(19) United States
(12) Patent Application Publication
(10) Pub. No.: US 2024/0180964 A1
(43) Pub. Date: Jun. 6, 2024

(54) CHIMERIC CYTOKINE RECEPTORS AND USES THEREOF IN CELLULAR THERAPIES

(71) Applicant: Nanjing Legend Biotech Co., Ltd., Nanjing (CN)

(72) Inventors: Qingling JIANG, Nanjing (CN); Yafeng ZHANG, Nanjing (CN); Yanliang ZHU, Nanjing (CN); Miaomiao SHI, Nanjing (CN); Shu WU, Nanjing (CN)

(21) Appl. No.: 18/286,684

(22) PCT Filed: Apr. 19, 2022
(86) PCT No.: PCT/CN2022/087572

§ 371 Date: Oct. 12, 2023

(30) Foreign Application Priority Data
Apr. 19, 2021 (WO) PCT/CN2021/088111

(51) Int. Cl. A61K 35/17; A61K 39/00; A61P 35/00; C07K 16/28; C12N 5/0783

(52) U.S. Cl. CPC A61K 35/17; A61K 39/4611; A61K 39/4631; A61K 39/464429; A61P 35/00; C07K 16/2851; C07K 16/2896; C12N 5/0636; A61K 2239/13; A61K 2239/17; A61K 2239/21; A61K 2239/22; A61K 2239/48

(57) ABSTRACT

An immune effector cell expressing a chimeric cytokine receptor comprising a first extracellular antigen binding domain, a first transmembrane domain, and a cytokine receptor intracellular domain; and a functional exogenous receptor comprising a second extracellular antigen binding domain, a second transmembrane domain, and an intracellular signaling domain.

### CROSS REFERENCE

[0001] This application claims benefit of priority of International Patent Application No. PCT/CN2021/088111 filed on Apr. 19, 2021, the content of which is incorporated herein by reference in its entirety.

### SEQUENCE LISTING

[0002] This application incorporates by reference a Sequence Listing submitted with this application as a text format, entitled “P11132-PCT.220419.Sequence Listing.txt,” created on Apr. 15, 2022 having a size of 10,10,034 bytes.

### 1. FIELD

[0003] The present disclosure relates to chimeric cytokine receptors, engineered immune effector cells comprising same, and methods of use thereof. The present disclosure further relates to activation and expansion of cells for therapeutic uses, especially to functional exogenous receptors (such as chimeric antigen receptors)-based T cell immunotherapies.

### 2. BACKGROUND

[0004] Adoptive transfer of T cells represents an emerging innovative therapeutic strategy against cancer. Nevertheless, various barriers restrict the efficacy and/or prevent the widespread use of CAR-T cell therapies particularly in solid tumors. There are four CAR-T products approved by the FDA, they are all autologous CAR-T cells that are derived from the subject's own T cells. Allogeneic CAR-T cells derived from healthy donors offers a more commercially viable off-the-shelf option with the potential to treat a broader range of subjects. Although allogeneic CAR-T cells has many advantages over autologous CAR-T cells, the durability of the responses to the former was shorter than that the latter. Thus, there is a need in the art for the next-generation allogeneic CAR-T cells with improved persistence.

### 3. SUMMARY

[0005] In one aspect, provided herein is an immune effector cell expressing (i) a chimeric cytokine receptor comprising (a) a first extracellular antigen binding domain, (b) a first transmembrane domain, and (c) a cytokine receptor intracellular domain; and (ii) optionally a functional exogenous receptor comprising (a) a second extracellular antigen binding domain, (b) a second transmembrane domain, and (c) an intracellular signaling domain.

[0006] In one aspect, provided herein is an immune effector cell expressing (i) a chimeric cytokine receptor comprising (a) a first transmembrane domain, and (b) a cytokine receptor intracellular domain; and (ii) a functional exogenous receptor comprising (a) an extracellular antigen binding domain, (b) a second transmembrane domain, and (c) an intracellular signaling domain.

[0007] In some embodiments, an immune effector cell expressing (i) a chimeric cytokine receptor comprising (a) a first extracellular antigen binding domain, wherein the first extracellular antigen binding domain is derived from NKG2D, truncated NKG2D, antibody or antigen binding fragment thereof targeting NKG2D ligands, TIGIT or SIRP-α, or a variant thereof, (b) a first transmembrane domain, and (c) a cytokine receptor intracellular domain; and (ii) optionally a functional exogenous receptor comprising (a) a second extracellular antigen binding domain, (b) a second transmembrane domain, and (c) an intracellular signaling domain. In some embodiments, an immune effector cell expressing (i) a chimeric cytokine receptor comprising (a) a first extracellular antigen binding domain, wherein the first extracellular antigen binding domain is derived from NKG2D, truncated NKG2D, antibody or antigen binding fragment thereof targeting NKG2D ligands, TIGIT or SIRP-α, or a variant thereof, (b) a first transmembrane domain, and (c) a cytokine receptor intracellular domain; and (ii) a functional exogenous receptor comprising (a) a second extracellular antigen binding domain, (b) a second transmembrane domain, and (c) an intracellular signaling domain. In some embodiments, immune effector cell comprises the amino acid sequence of SEQ ID NOs: 29, 135, 141, 143 or 149 or an amino acid sequence having at least 75%, 80%, 85%, 90%, 91%, 92%, 93%, 94%, 95%, 96%, 97%, 98%, or 99% identity to SEQ ID NOs: 29, 135, 141,143 or 149. In some embodiments, immune effector cell comprising the amino acid sequence of SEQ ID NOs: 30-134, 136-140, 142, 144, 146 or 148, or an amino acid sequence having at least 75%, 80%, 85%, 90%, 91%, 92%, 93%, 94%, 95%, 96%, 97%, 98%, or 99% identity to SEQ ID NOs: 30-134, 136-140, 142, 144, 146 or 148. In some embodiments, immune effector cell comprises the amino acid sequence of SEQ ID NOs:150 or 151, or an amino acid sequence having at least 75%, 80%, 85%, 90%, 91%, 92%, 93%, 94%, 95%, 96%, 97%, 98%, or 99% identity to SEQ ID NOs:150 or 151.

[0008] In some embodiments, the immune effector cell further comprises one or more tags. In some embodiments, a tag is linked to chimeric cytokine receptor and/or the functional exogenous receptor. In some embodiments, the tag linking to the chimeric cytokine receptor is different form the tag linking to the functional exogenous receptor. In some embodiments, the tag linking to the chimeric cytokine receptor and/or the functional exogenous receptor comprises an amino acid sequence of SEQ ID NOs: 4, 5 or 158-160, or an amino acid sequence having at least 75%, 80%, 90%, 91%, 92%, 93%, 94%, 95%, 96%, 97%, 98%, or 99% identity to an amino acid sequence selected from SEQ ID NOs: 4, 5 or 158-160.

[0009] In some embodiments, the extracellular antigen binding domain binds to an antigen expressed on the surface of a target cell such as a tumor cell. In some embodiments, the extracellular antigen binding domain is derived from NKG2D or truncated NKG2D (such as the ECD of NKG2D or truncated NKG2D), or a variant thereof. In some embodiments, the extracellular antigen binding domain comprises the amino acid sequence of SEQ ID NOs: 6, 156 or 157, or an amino acid sequence having at least 75%, 80%, 85%, 90%, 91%, 92%, 93%, 94%, 95%, 96%, 97%, 98%, or 99% identity to SEQ ID NOs: 6, 156 or 157. In some embodiments, the extracellular antigen binding domain is derived from an NKG2D ligand or a variant thereof. In some embodiments, the NKG2D ligand is selected from a group consisting of MICA/B, ULBP-1, ULBP-2,5,6 and ULBP-3. In some embodiments, the antibody or antigen binding fragment thereof comprises one or more scFv(s) or one or more sdAb(s) that bind to the NKG2D ligand. In some embodiments, the extracellular antigen binding domain is derived from TIGIT or a variant thereof. In some embodiments, the extracelluar antigen domain is derived from the ECD of TIGIT. In some embodiments, the extracellular antigen binding domain comprises the amino acid sequence of SEQ ID NO: 145 or an amino acid sequence having at least 75%, 80%, 85%, 90%, 91%, 92%, 93%, 94%, 95%, 96%, 97%, 98%, or 99% identity to SEQ ID NO: 145. In some embodiments, the extracellular antigen binding domain is derived from SIRP-a or a variant thereof. In some embodiments, the extracelluar antigen domain is derived from the ECD of SIRP-α. In some embodiments, the extracellular antigen binding domain comprises the amino acid sequence of SEQ ID NO: 147 or an amino acid sequence having at least 75%, 80%, 85%, 90%, 91%, 92%, 93%, 94%, 95%, 96%, 97%, 98%, or 99% identity to SEQ ID NO: 147. In some embodiments, the first or the second extracellular antigen binding domain binds to an antigen expressed on the surface of a target cell such as a tumor cell. In some embodiments, the first or the second extracellular antigen binding domain is derived from NKG2D or truncated NKG2D (such as the ECD of NKG2D or truncated NKG2D), or a variant thereof. In some embodiments, the first or the second extracellular antigen binding domain comprises the amino acid sequence of SEQ ID NOs: 6, 156 or 157, or an amino acid sequence having at least 75%, 80%, 85%, 90%, 91%, 92%, 93%, 94%, 95%, 96%, 97%, 98%, or 99% identity to SEQ ID NOs: 6, 156 or 157. In some embodiments, the first or the second extracellular antigen binding domain is derived from an NKG2D ligand or a variant thereof. In some embodiments, the NKG2D ligand is selected from a group consisting of MICA/B, ULBP-1, ULBP-2,5,6 and ULBP-3. In some embodiments, the antibody or antigen binding fragment thereof comprises one or more scFv(s) or one or more sdAb(s) that bind to the NKG2D ligand. In some embodiments, the first or the second extracellular antigen binding domain is derived from TIGIT or a variant thereof. In some embodiments, the first or the second extracelluar antigen domain is derived from the ECD of TIGIT. In some embodiments, the first or the second extracellular antigen binding domain comprises the amino acid sequence of SEQ ID NO: 145 or an amino acid sequence having at least 75%, 80%, 85%, 90%, 91%, 92%, 93%, 94%, 95%, 96%, 97%, 98%, or 99% identity to SEQ ID NO: 145. In some embodiments, the first or the second extracellular antigen binding domain is derived from SIRP-a or a variant thereof. In some embodiments, the first or the second extracelluar antigen domain is derived from the ECD of SIRP-α. In some embodiments, the first or the second extracellular antigen binding domain comprises the amino acid sequence of SEQ ID NO: 147 or an amino acid sequence having at least 75%, 80%, 85%, 90%, 91%, 92%, 93%, 94%, 95%, 96%, 97%, 98%, or 99% identity to SEQ ID NO: 147.

[0010] In some embodiments, the first transmembrane domain comprises a Janus Kinase (JAK)-binding domain. In some embodiments, the JAK-binding domain is derived from a group consisting of EPOR, GHR, TPOR, and a variant thereof. In some embodiments, the JAK-binding domain is derived from TPOR, e.g., comprising an amino acid sequence of SEQ ID NO: 7 or an amino acid sequence having at least 75%, 80%, 85%, 90%, 91%, 92%, 93%, 94%, 95%, 96%, 97%, 98%, or 99% identity to SEQ ID NO:7. In some embodiments, the JAK-binding domain is derived from EPOR. In some embodiments, the JAK-binding domain is derived from GHR.

[0011] In some embodiments, the cytokine receptor intracellular domain is derived from one or more cytokine receptors selected from a group consisting of IL2Rα, IL7Rα, IL9R-1, IL9R-2, IL9R-3, IL12Rβ1, IL12Rβ2, IL15Rα, IL15Rβ-1, IL15Rβ-2, IL15Rβ-3, IL18Rα, IL18Rβ, IL21R-1, IL21R-2, IL21R-3, IL10R2, IL22R1, IL23R-1, IL23R-2, TL23R-3, IL27Rα, gp130, IL31RA, OSMRβ, IL36R, IL1RAcP, GM-CSFRα, GM-CSFRβ-1, GM-CSFRβ-2, a variant thereof, and combinations thereof. In some embodiments, the cytokine receptor intracellular domain is selected from IL-7Rα, IL12Rβ1, IL12Rβ2, IL15Rα, IL15Rβ-1, IL15Rβ-2, IL15Rβ-3, IL-18Rα, IL18Rβ, IL21R-1, IL21R-2, IL21R-3, IL23R-1, IL23R-2, TL23R-3, GM-CSFRα, GM-CSFRβ-1, GM-CSFRβ-2, IL9R-1, IL9R-2, IL9R-3, IL-7Rα-IL12Rβ1, IL-7Rα-IL15Rα, IL-7Rα-IL15RP-1, IL-7Rα-IL15Rβ-2, IL7Rα-IL21R-1, IL7Rα-IL21R-2, IL7Rα-IL21R-3, IL7Rα-IL23R-2, IL7Rα-GMCSFRα, IL-7Rα-GM-CSFRβ-1, IL-7Rα-GM-CSFRβ-2, IL12Rβ1-IL15Rα, IL12Rβ1-IL15Rβ-1, IL12Rβ1-IL15Rβ-2, IL12Rβ1-IL-21R-1, IL12Rβ1-IL-21R-2, IL12Rβ1-IL-21R-3, IL12Rβ1-IL-23R-2, IL12Rβ1-GM-CSFRα, IL12Rβ1-GM-CSFRβ-1, IL12Rβ1-GM-CSFRβ-2, IL12Rβ2-IL15Rα, IL12Rβ2-IL15Rβ-1, IL12Rβ2-IL15Rβ-2, IL12Rβ2-IL-21R-1, IL12Rβ2-IL-21R-2, IL12Rβ2-IL-21R-3, IL12Rβ2-IL-23R-2, IL12Rβ2-GM-CSFRα, IL12Rβ2-GM-CSFRβ-1, IL12Rβ2-GM-CSFRβ-2, IL15Rα-IL-21R-1, IL15Rα-IL-21R-2, IL15Rα-IL-21R-3, IL15Rα-IL-23R-2, IL15Rα-GM-CSFRα, IL15Rα-GM-CSFRβ-1, IL15Rα-GM-CSFRβ-2, IL15Rβ-1-IL-21R-1, L15Rβ-1-IL-21R-2, IL15Rβ-1-IL-21R-3, IL15Rβ-1-IL-23R-2, IL15Rβ-1-GM-CSFRα, IL15Rβ-1-GM-CSFRβ-1, IL15Rβ-1-GM-CSFRβ-2, IL15Rβ-2-IL-21R-1, IL15Rβ-2-IL-21R-2, IL15Rβ-2-IL-21R-3, L15Rβ-2-IL-23R-2, IL15Rβ-2-GM-CSFRα, IL15Rβ-2-GM-CSFRβ-1, IL15Rβ-2-GM-CSFRβ-2, IL-21R-1-IL-23R-2, IL-21R-1-GM-CSFRα, IL-21R-1-GM-CSFRβ-1, IL-21R-1-GM-CSFRβ-2, IL-21R-2-IL-23R-2, IL-21R-2-GM-CSFRα, IL-21R-2-GM-CSFRβ-1, IL-21R-2-GM-CSFRβ-2, IL-21R-3-IL-23R-2, IL-21R-3-GM-CSFRα, IL-21R-3-GM-CSFRβ-1, IL-21R-3-GM-CSFRβ-2, IL-23R-2-GM-CSFRα, IL-23R-2-GM-CSFRβ-1, IL-23R-2-GM-CSFRβ-2, IL-7Rα-IL-9R-2, IL12Rβ1-IL-9R-2, IL12Rβ2-IL-9R-2, IL15Rα-IL-9R-2, IL15Rβ-1-IL-9R-2, IL15Rβ-2-IL-9R-2, IL-21R-1-IL-9R-2, IL-21R-2-IL-9R-2, IL-21R-3-IL-9R-2, IL-23R-2-IL-9R-2, GM-CSFRα-IL-9R-2, GM-CSFRβ-1-IL-9R-2, GM-CSFRβ-2-IL-9R-2, IL-7Rα-IL-12Rβ2, or a variant thereof. In some embodiments, the cytokine receptor intracellular domain comprises a region having an amino acid sequence selected from SEQ ID NOs: 8-28, or an amino acid sequence having at least 75%, 80%, 90%, 91%, 92%, 93%, 94%, 95%, 96%, 97%, 98%, or 99% identity to an amino acid sequence selected from SEQ ID NOs: 8-28. In a specific embodiment, the cytokine receptor intracellular domain comprises one or more the amino acid sequences of SEQ ID NO: 8, 10, 14-17 or 20-28.

[0012] In some embodiments, the functional exogenous receptor is a T cell receptor (TCR), a chimeric antigen receptor (CAR), a chimeric TCR (cTCR), or a T cell antigen coupler (TAC)-like chimeric receptor. In some embodiments, the functional exogenous receptor is a CAR. In other embodiments, the functional exogenous receptor is a TCR. In some embodiments, functional exogenous receptor is a CAR as described in more detail in Section 5.2.2. For example, the extracellular domain of the CAR can be in any formats including, e.g., a single CAR, dual CAR, tandem CAR, or split CAR. The extracellular domain of the functional exogenous receptor can bind to antigen expressed on a target cell, e.g., a tumor cell. In some embodiments, the CAR binds to a tumor-associated antigen. In some embodiments, the tumor-associated antigen is selected from the group consisting of GPC3, AFP, Claudin 18.2, CD19, CD20, CD22, BCMA, GD2, DLL3, MSLN, CD30, CLL1 and CD33. In some specific embodiments, the CAR provided herein binds to GPC3. In some more specific embodiments, the CAR comprises the amino acid sequence of SEQ ID NO: 29 or 135. In some specific embodiments, the CAR provided herein binds to CD19. In some more specific embodiments, the CAR comprises the amino acid sequence of SEQ ID NO: 141. In some specific embodiments, the CAR provided herein binds to CD33. In some more specific embodiments, the CAR comprises the amino acid sequence of SEQ ID NO: 143.

[0013] In some embodiments, the second transmembrane domain is derived from a molecule selected from the group consisting of CD8, CD4, CD28, CD137, CD80, CD86, CD152 and PD1. In some embodiments, the second transmembrane domain is from CD8α or CD28.

[0014] In some embodiments, the intracellular signaling domain comprises a primary intracellular signaling domain of an immune effector cell. In some embodiments, the primary intracellular signaling domain is from CD3ζ.

[0015] In some embodiments, the intracellular signaling domain comprises a co-stimulatory signaling domain.

[0016] In some embodiments, the co-stimulatory signaling domain is derived from a co-stimulatory molecule selected from the group consisting of CD27, CD28, CD137, OX40, CD30, CD40, CD3, LFA-1, ICOS, CD2, CD7, LIGHT, NKG2C, B7-H3, ligands of CD83 and combinations thereof. In some embodiments, the co-stimulatory signaling domain comprises a cytoplasmic domain of CD28 and/or a cytoplasmic domain of CD137.

[0017] In some embodiments, the functional exogenous receptor further comprises a hinge domain located between the C-terminus of the extracellular antigen binding domain and the N-terminus of the transmembrane domain. In some embodiments, the hinge domain is from CD8α.

[0018] In some embodiments, the chimeric cytokine receptor and/or the functional exogenous receptor further comprises a signal peptide at the N-terminus of the chimeric cytokine receptor and/or the functional exogenous receptor. In some embodiments, the signal peptide is from CD8α.

[0019] In some embodiments, the immune effector cell is a T cell, a natural killer (NK) cell, an NK T cell, a macrophage, a peripheral blood mononuclear cell (PBMC), a monocyte, a neutrophil, or an eosinophil. In some embodiments, the T cell is a cytotoxic T cell, a helper T cell, a natural killer T cell, a αβ T cell, or a γδT cell.

[0020] In another aspect, provided herein is a polypeptide comprising (i) a chimeric cytokine receptor comprising (a) a first extracellular antigen binding domain, (b) a first transmembrane domain, and (c) a cytokine receptor intracellular domain; and (ii) optionally a functional exogenous receptor comprising (a) a second extracellular antigen binding domain, (b) a second transmembrane domain, and (c) an intracellular signaling domain. In one aspect, provided herein is a polypeptide comprising (i) a chimeric cytokine receptor comprising (a) a first transmembrane domain, and (b) a cytokine receptor intracellular domain; and (ii) a functional exogenous receptor comprising (a) an extracellular antigen binding domain, (b) a second transmembrane domain, and (c) an intracellular signaling domain.

[0021] In some embodiments, a polypeptide comprising (i) a chimeric cytokine receptor comprising (a) a first extracellular antigen binding domain, wherein the first extracellular antigen binding domain is derived from NKG2D, truncated NKG2D, antibody or antigen binding fragment thereof targeting NKG2D ligands, TIGIT or SIRP-α, or a variant thereof, (b) a first transmembrane domain, and (c) a cytokine receptor intracellular domain; and (ii) optionally a functional exogenous receptor comprising (a) a second extracellular antigen binding domain, (b) a second transmembrane domain, and (c) an intracellular signaling domain. In some embodiments, a polypeptide comprising (i) a chimeric cytokine receptor comprising (a) a first extracellular antigen binding domain, wherein the first extracellular antigen binding domain is derived from NKG2D, truncated NKG2D, antibody or antigen binding fragment thereof targeting NKG2D ligands, TIGIT or SIRP-α, or a variant thereof, (b) a first transmembrane domain, and (c) a cytokine receptor intracellular domain; and (ii) a functional exogenous receptor comprising (a) a second extracellular antigen binding domain, (b) a second transmembrane domain, and (c) an intracellular signaling domain. In some embodiments, a polypeptide comprises the amino acid sequence of SEQ ID NOs: 29, 135, 141, 143 or 149, or an amino acid sequence having at least 75%, 80%, 85%, 90%, 91%, 92%, 93%, 94%, 95%, 96%, 97%, 98%, or 99% identity to SEQ ID NOs: 29, 135, 141,143 or 149. In some embodiments, a polypeptide comprises the amino acid sequence of ID NOs: 30-134, 136-140, 142, 144, 146, or 148, or an amino acid sequence having at least 75%, 80%, 85%, 90%, 91%, 92%, 93%, 94%, 95%, 96%, 97%, 98%, or 99% identity to SEQ ID NOs: 30-134, 136-140, 142, 144,146 or 148. In some embodiments, a polypeptide comprises further comprises one or more tags. In some embodiments, a tag is linked to chimeric cytokine receptor and/or the functional exogenous receptor. In some embodiments, the tag linking to the chimeric cytokine receptor is different form the tag linking to the functional exogenous receptor. In some embodiments, the tag linking to the chimeric cytokine receptor the tag comprises an amino acid sequence of SEQ ID NOs: 4, 5 or 158-160, or an amino acid sequence having at least 75%, 80%, 90%, 91%, 92%, 93%, 94%, 95%, 96%, 97%, 98%, or 99% identity to an amino acid sequence selected from SEQ ID NOs: 4, 5 or 158-160. In some embodiments, immune effector cell comprises the amino acid sequence of SEQ ID NOs:150 or 151, or an amino acid sequence having at least 75%, 80%, 85%, 90%, 91%, 92%, 93%, 94%, 95%, 96%, 97%, 98%, or 99% identity to SEQ ID NOs:150 or 151.

[0022] In some embodiments, the first extracellular antigen binding domain binds to an antigen expressed on the surface of a target cell such as a tumor cell. In some embodiments, the first extracellular antigen binding domain is derived from NKG2D or truncated NKG2D (such as the ECD of NKG2D or truncated NKG2D), or a variant thereof. In some embodiments, the first extracellular antigen binding domain comprises the amino acid sequence of SEQ ID NOs: 6, 156 or 157, or an amino acid sequence having at least 75%, 80%, 85%, 90%, 91%, 92%, 93%, 94%, 95%, 96%, 97%, 98%, or 99% identity to SEQ ID NOs: 6, 156 or 157. In some embodiments, the first extracellular antigen binding domain is derived from truncated NKG2D (amino acid positions 89-216, SEQ ID NO: 157). In some embodiments, the first extracellular antigen binding domain is derived from truncated NKG2D (amino acid positions 98-216, SEQ ID NO: 156). In some embodiments, the first extracellular antigen binding domain comprises the amino acid sequence of SEQ ID NO: 6. In some embodiments, the first extracellular antigen binding domain is derived from TIGIT (such as the ECD of TIGIT). In some embodiments, the first extracellular antigen binding domain comprises the amino acid sequence of SEQ ID NO: 145. In some embodiments, the first extracellular antigen binding domain is derived from SIRP-α (such as the ECD of SIRP-a). In some embodiments, the first extracellular antigen binding domain comprises the amino acid sequence of SEQ ID NO: 147. In some embodiments, the first extracellular antigen binding domain is derived from an antibody or antigen binding fragment thereof targeting NKG2D ligand or a variant thereof. In some embodiments, the NKG2D ligand is selected from a group consisting of MICA/B, ULBP-1, ULBP-2,5,6 and ULBP-3. In some embodiments, the antibody or antigen binding fragment thereof comprises one or more scFv(s) or one or more sdAb(s) that bind to the NKG2D ligand.

[0023] In some embodiments, the first transmembrane domain comprises a Janus Kinase (JAK)-binding domain. In some embodiments, the JAK-binding domain is derived from a group consisting of EPOR, GHR, TPOR, or a variant thereof. In some embodiments, the JAK-binding domain is derived from TPOR, e.g., comprising an amino acid sequence of SEQ ID NO: 7 or an amino acid sequence having at least 75%, 80%, 85%, 90%, 91%, 92%, 93%, 94%, 95%, 96%, 97%, 98%, or 99% identity to SEQ ID NO:7. In some embodiments, the JAK-binding domain is derived from EPOR. In some embodiments, the JAK-binding domain is derived from GHR.

[0024] In some embodiments, the cytokine receptor intracellular domain is derived from one or more cytokine receptors selected from a group consisting of IL2Rα, IL7Rα, IL9R-1, IL9R-2, IL9R-3, IL12Rβ1, IL12Rβ2, IL15Rα, IL15Rβ-1, IL15Rβ-2, IL15Rβ-3, IL18Rα, IL18Rβ, IL21R-1, IL21R-2, IL21R-3, IL10R2, IL22R1, IL23R-1, IL23R-2, TL23R-3, IL27Rα, gp130, IL31RA, OSMRβ, IL36R, IL1RAcP, GM-CSFRα, GM-CSFRβ-1, GM-CSFRβ-2, a variant thereof, and combinations thereof. In some embodiments, the cytokine receptor intracellular domain is derived from cytokine receptors selected from IL-7Rα, IL12Rβ1, IL12Rβ2, IL15Rα, IL15Rβ-1, IL15Rβ-2, IL15Rβ-3, IL-18Rα, IL18Rβ, IL21R-1, IL21R-2, IL21R-3, IL23R-1, IL23R-2, TL23R-3, GM-CSFRα, GM-CSFRβ-1, GM-CSFRβ-2, IL9R-1, IL9R-2, TL9R-3, IL-7Rα-IL12Rβ1, IL-7Rα-IL15Rα, IL-7Rα-IL15Rβ-1, IL-7Rα-IL15Rβ-2, IL-7Rα-IL21R-1, IL-7Rα-IL21R-2, IL-7Rα-IL21R-3, IL-7Rα-IL23R-2, IL-7Rα-GMCSFRα, IL-7Rα-GM-CSFRβ-1, IL-7Rα-GM-CSFRβ-2, IL12Rβ1-IL15Rα, IL12Rβ1-IL15Rβ-1, IL12Rβ1-IL15Rβ-2, IL12Rβ1-IL-21R-1, IL12Rβ1-IL-21R-2, IL12Rβ1-IL-21R-3, IL12Rβ1-IL-23R-2, IL12Rβ1-GM-CSFRα, IL12Rβ1-GM-CSFRβ-1, IL12Rβ1-GM-CSFRβ-2, IL12Rβ2-IL15Rα, IL12Rβ2-IL15Rβ-1, IL12Rβ2-IL15Rβ-2, IL12Rβ2-IL-21R-1, IL12Rβ2-IL-21R-2, IL12Rβ2-IL-21R-3, IL12Rβ2-IL-23R-2, IL12Rβ2-GM-CSFRα, IL12Rβ2-GM-CSFRβ-1, IL12Rβ2-GM-CSFRβ-2, IL15Rα-IL-21R-1, IL15Rα-IL-21R-2, IL15Rα-IL-21R-3, IL15Rα-IL-23R-2, IL15Rα-GM-CSFRα, IL15Rα-GM-CSFRβ-1, IL15Rα-GM-CSFRβ-2, IL15Rβ-1-IL-21R-1, L15Rβ-1-IL-21R-2, IL15Rβ-1-IL-21R-3, IL15Rβ-1-IL-23R-2, IL15Rβ-1-GM-CSFRα, IL15Rβ-1-GM-CSFRβ-1, IL15Rβ-1-GM-CSFRβ-2, IL15Rβ-2-IL-21R-1, IL15Rβ-2-IL-21R-2, IL15Rβ-2-IL-21R-3, L15Rβ-2-IL-23R-2, IL15Rβ-2-GM-CSFRα, IL15Rβ-2-GM-CSFRβ-1, IL15Rβ-2-GM-CSFRβ-2, IL-21R-1-IL-23R-2, IL-21R-1-GM-CSFRα, IL-21R-1-GM-CSFRβ-1, IL-21R-1-GM-CSFRβ-2, IL-21R-2-IL-23R-2, IL-21R-2-GM-CSFRα, IL-21R-2-GM-CSFRβ-1, IL-21R-2-GM-CSFRβ-2, IL-21R-3-IL-23R-2, IL-21R-3-GM-CSFRα, IL-21R-3-GM-CSFRβ-1, IL-21R-3-GM-CSFRβ-2, IL-23R-2-GM-CSFRα, IL-23R-2-GM-CSFRβ-1, IL-23R-2-GM-CSFRβ-2, IL-7Rα-IL-9R-2, IL12Rβ1-IL-9R-2, IL12Rβ2-IL-9R-2, IL15Rα-IL-9R-2, IL15Rβ-1-IL-9R-2, IL15Rβ-2-IL-9R-2, IL-21R-1-IL-9R-2, IL-21R-2-IL-9R-2, IL-21R-3-IL-9R-2, IL-23R-2-IL-9R-2, GM-CSFRα-IL-9R-2, GM-CSFRβ-1-IL-9R-2, GM-CSFRβ-2-IL-9R-2, IL-7Rα-IL-12Rβ2, or a variant thereof. In some embodiments, the cytokine receptor intracellular domain comprises a region having an amino acid sequence selected from SEQ ID NOs: 8-28, or an amino acid sequence having at least 75%, 80%, 90%, 91%, 92%, 93%, 94%, 95%, 96%, 97%, 98%, or 99% identity to an amino acid sequence selected from SEQ ID NOs: 8-28. In a specific embodiment, the cytokine receptor intracellular domain comprises one or more the amino acid sequences of SEQ ID NO: 8, 10, 14-17 or 20-28.

[0025] In some embodiments, the functional exogenous receptor is a T cell receptor (TCR), a chimeric antigen receptor (CAR), a chimeric TCR (cTCR), or a T cell antigen coupler (TAC)-like chimeric receptor. In some embodiments, the functional exogenous receptor is a CAR. In other embodiments, the functional exogenous receptor is a TCR. In some embodiments, the CAR is a single CAR, dual CAR, tandem CAR or split CAR. In some embodiments, the CAR is as described in Section 5.2.2. In some specific embodiments, the CAR provided herein binds to a tumor-associated antigen. In some specific embodiments, the CAR provided herein binds to GPC3, CD19 or CD33. In some more specific embodiments, the CAR provided herein comprises the amino acid sequence of SEQ ID NOs: 29, 135, 141, 143 or 149, or an amino acid sequence having at least 75%, 80%, 85%, 90%, 91%, 92%, 93%, 94%, 95%, 96%, 97%, 98%, or 99% identity to SEQ ID NOs: 29, 135, 141,143 or 149.

[0026] In some embodiments, the second transmembrane domain is derived from a molecule selected from the group consisting of CD8, CD4, CD28, CD137, CD80, CD86, CD152 and PD1. In some embodiments, the second transmembrane domain is from CD8α or CD28.

[0027] In some embodiments, the intracellular signaling domain comprises a primary intracellular signaling domain of an immune effector cell. In some embodiments, the primary intracellular signaling domain is from CD3ζ.

[0028] In some embodiments, the intracellular signaling domain comprises a co-stimulatory signaling domain. In some embodiments, the co-stimulatory signaling domain is derived from a co-stimulatory molecule selected from the group consisting of CD27, CD28, CD137, OX40, CD30, CD40, CD3, LFA-1, ICOS, CD2, CD7, LIGHT, NKG2C, B7-H3, ligands of CD83, and combinations thereof. In some embodiments, the co-stimulatory signaling domain comprises a cytoplasmic domain of CD28 and/or a cytoplasmic domain of CD137.

[0029] In some embodiments, the functional exogenous receptor further comprises a hinge domain located between the C-terminus of the extracellular antigen binding domain and the N-terminus of the transmembrane domain. In some embodiments, the hinge domain is from CD8α.

[0030] In some embodiments, the chimeric cytokine receptor and/or the functional exogenous receptor further comprises a signal peptide at the N-terminus of the chimeric cytokine receptor and/or the functional exogenous receptor. In some embodiments, the signal peptide is from CD8α.

[0031] In some embodiments, the chimeric cytokine receptor and the functional exogenous receptor are linked to each other via a peptide linker. In some embodiments, the peptide linker is a 2A self-cleaving peptide optionally selected from a group consisting of F2A, E2A, P2A, T2A, and variants thereof.

[0032] In some embodiments, the polypeptide further comprises one or more tags. In some embodiments, a tag is linked to chimeric cytokine receptor and/or the functional exogenous receptor. In some embodiments, the tag linking to the chimeric cytokine receptor is different form the tag linking to the functional exogenous receptor. In some embodiments, the tag linking to the chimeric cytokine receptor and/or the functional exogenous receptor comprises an amino acid sequence of SEQ ID NOs: 4, 5 or 158-160, or an amino acid sequence having at least 75%, 80%, 90%, 91%, 92%, 93%, 94%, 95%, 96%, 97%, 98%, or 99% identity to an amino acid sequence selected from SEQ ID NOs: 4, 5 or 158-160.

[0033] In another aspect, provided herein is an isolated nucleic acid comprising a nucleic acid sequence encoding the polypeptide provided herein. In yet another aspect, provided herein is an isolated nucleic acid comprising (i) a first region encoding a chimeric cytokine receptor comprising (a) a first extracellular antigen binding domain, wherein the first extracellular antigen binding domain is derived from NKG2D, truncated NKG2D, antibody or antigen binding fragment thereof targeting NKG2D ligands, TIGIT, or SIRP-α, or a variant thereof, (b) a first transmembrane domain, and (c) a cytokine receptor intracellular domain; and (ii) optionally a second region encoding a functional exogenous receptor comprising (a) a second extracellular antigen binding domain, (b) a second transmembrane domain, and (c) an intracellular signaling domain. In yet another aspect, provided herein is a vector comprising the isolated nucleic acid provided herein.

[0034] In yet another aspect, provided herein is a method of making an immune effector cell comprising introducing into an immune cell the nucleic acid or the vector provided herein. In yet another aspect, provided herein is a method of making an immune effector cell comprising introducing into an immune cell a composition comprising (i) a first nucleic acid encoding a chimeric cytokine receptor comprising (a) a first extracellular antigen binding domain, (b) a first transmembrane domain, and (c) a cytokine receptor intracellular domain; and (ii) optionally a second nucleic acid encoding a functional exogenous receptor comprising (a) a second extracellular antigen binding domain, (b) a second transmembrane domain, and (c) an intracellular signaling domain.

[0035] In yet another aspect, provided herein is an immune effector cell produced according the method provided herein.

[0036] In yet another aspect, provided herein is a pharmaceutical composition, comprising the immune effector cell, the polypeptide, the nucleic acid, or the vector provided herein, and a pharmaceutically acceptable carrier.

[0037] In yet another aspect, provided herein is a method of treating a disease or disorder in a subject, comprising administering to the subject an effective amount of the pharmaceutical composition provided herein.

[0038] In yet another aspect, provided herein is a disease or disorder comprising a cancer, an inflammatory or autoimmune disease. In some embodiments, a cancer is solid cancer or hematologic cancer. In some embodiments, a cancer is liver cancer, lymphoma, acute myeloid leukemia (AML) or chronic myelogenous leukemia (CML).

[0039] In another aspect, provided herein is a chimeric cytokine receptor comprising: (a) an extracellular antigen binding domain, (b) a transmembrane domain, and (c) a cytokine receptor intracellular domain. In some embodiments, the extracellular antigen binding domain is derived from NKG2D, truncated NKG2D, antibody or antigen binding fragment thereof targeting NKG2D ligands, TIGIT, SIRP-α, or a variant thereof. In some embodiments, the extracellular antigen binding domain is derived from the extracellular domain of NKG2D or a variant thereof, wherein optionally the extracellular antigen binding domain comprises the amino acid sequence of SEQ ID NOs: 6, 156 or 157 or an amino acid sequence having at least 75%, 80%, 85%, 90%, 91%, 92%, 93%, 94%, 95%, 96%, 97%, 98%, or 99% identity to SEQ ID NOs: 6, 156 or 157. In other embodiments, the extracelluar domain comprises an antibody or antigen binding fragment thereof that binds to an NKG2D ligand. In some embodiments, the extracelluar domain comprises one or more scFv(s) or one or more sdAb(s) that bind to an NKG2D ligand. In some embodiments, the NKG2D ligand is selected from a group consisting of MICA/B, ULBP-1, ULBP-2,5,6 and ULBP-3. In some embodiments, the extracellular antigen binding domain is derived from an extracellular domain of an immune checkpoint. In some embodiments, the immune checkpoint is selected from a group consisting of PD-1, CTLA4, or a variant thereof. In some embodiments, the immune checkpoint is PD-1. In some embodiments, the immune checkpoint is CTLA4.

[0040] In another aspect, provided herein is an immune effector cell expressing the chimeric cytokine receptor provided herein.

### 4. BRIEF DESCRIPTION OF THE FIGURES

[0041] FIGS. 1A-1B show exemplary constructs of CARs or TCRs armored with NKG2D, truncated NKG2D or mutated NKG2D chimeric cytokine receptor. FIG. 1A shows a schematic of a CAR armored with NKG2D, truncated NKG2D or mutated NKG2D chimeric cytokine receptor. FIG. 1B shows a schematic of a TCR NKG2D, truncated NKG2D or mutated NKG2D chimeric cytokine receptor.

[0042] FIGS. 2A-2B show exemplary constructs of CARs or TCRs armored with chimeric cytokine receptor which includes a binding domain targeting NKG2D ligands. FIG. 2A shows a schematic of a CAR armored with chimeric cytokine receptor which includes a binding domain targeting NKG2D ligands. FIG. 2B shows a schematic of a TCR armored with chimeric cytokine receptor which includes a binding domain targeting NKG2D ligands.

[0043] FIGS. 3A-3B show exemplary constructs of CARs or TCRs armored with different cytokine receptors. FIG. 3A shows a CAR armored with NKG2D or mutated NKG2D chimeric cytokine receptors. FIG. 3B shows a TCR armored with NKG2D or mutated NKG2D chimeric cytokine receptors.

[0044] FIG. 4 shows ligand surface expression of NKG2D on HCC cell lines huh7.

[0045] FIG. 5 shows long-term cytotoxicity of anti-GPC3 CAR or NKG2D chimeric two cytokine receptors armored anti-GPC3 CAR γδT cells co-culture with huh7 cells.

[0046] FIG. 6 shows T cell proliferation in long-term co-cultures of anti-GPC3 CAR T or NKG2D chimeric two cytokine receptors armored anti-GPC3 CAR γδT cells with huh7 cells.

[0047] FIG. 7 shows long-term cytotoxicity of NKG2D chimeric single cytokine receptors armored anti-GPC3 CAR γδT cells co-culture with huh7 cells.

[0048] FIG. 8 shows T cell proliferation in long-term co-cultures of NKG2D chimeric single cytokine receptors armored anti-GPC3 CAR γδT cells with huh7 cells.

[0049] FIG. 9 shows long-term cytotoxicity of NKG2D chimeric two cytokine receptors armored anti-GPC3 CAR γδT cells co-culture with huh7 cells.

[0050] FIG. 10 shows T cell proliferation in long-term co-cultures of NKG2D chimeric two cytokine receptors armored anti-GPC3 CAR γδT cells with huh7 cells.

[0051] FIG. 11 shows long-term cytotoxicity of NKG2D chimeric two cytokine receptors armored anti-GPC3 CAR γδT cells co-culture with huh7 cells.

[0052] FIG. 12 shows T cell proliferation in long-term co-cultures of NKG2D chimeric two cytokine receptors armored anti-GPC3 CAR γδT cells with huh7 cells.

[0053] FIG. 13 shows long-term cytotoxicity of NKG2D chimeric two cytokine receptors armored anti-GPC3 CAR αβT cells co-culture with huh7 cells.

[0054] FIG. 14 shows T cell proliferation in long-term co-cultures of NKG2D chimeric two cytokine receptors armored anti-GPC3 CAR αβT cells with huh7 cells.

[0055] FIG. 15 shows long-term cytotoxicity of NKG2D chimeric two cytokine receptors armored anti-GPC3 CAR αβT cells co-culture with huh7 cells.

[0056] FIG. 16 shows T cell proliferation in long-term co-cultures of NKG2D chimeric two cytokine receptors armored anti-GPC3 CAR αβT cells with huh7 cells.

[0057] FIG. 17 shows long-term cytotoxicity of truncated NKG2D chimeric two cytokine receptors armored anti-GPC3 CAR αβT cells co-culture with huh7 cells.

[0058] FIG. 18 shows T cell proliferation in long-term co-cultures of truncated NKG2D chimeric two cytokine receptors armored anti-GPC3 CAR αβT cells with huh7 cells.

[0059] FIG. 19 shows long-term cytotoxicity of anti-MIC-A/B scFv chimeric two cytokine receptors armored anti-GPC3 CAR γδT cells co-culture with huh7 cells.

[0060] FIG. 20 shows T cell proliferation in long-term co-cultures of anti-MIC-A/B scFv chimeric two cytokine receptors armored anti-GPC3 CAR γδT cells with huh7 cells.

[0061] FIG. 21 shows anti-tumor effect of anti-GPC3 CAR γδT cells or anti-GPC3 CAR γδT cells armored with NKG2D chimeric two cytokine receptors in huh7 xenograft model.

[0062] FIG. 22 shows long-term cytotoxicity of NKG2D chimeric two cytokine receptors armored construct 185 CAR αβT cells co-culture with huh7 cells.

[0063] FIG. 23 shows T cell proliferation in long-term co-cultures of NKG2D chimeric two cytokine receptors armored construct 185 CAR αβT cells with huh7 cells.

[0064] FIG. 24 shows long-term cytotoxicity of NKG2D chimeric two cytokine receptors armored CTL-019 CAR γδT cells co-culture with Raji cells.

[0065] FIG. 25 shows T cell proliferation in long-term co-cultures of NKG2D chimeric two cytokine receptors armored CTL-019 CAR γδT cells co-culture with Raji cells.

[0066] FIG. 26 shows long-term cytotoxicity of NKG2D chimeric two cytokine receptors armored CTL-019 CAR αβT cells co-culture with Raji cells.

[0067] FIG. 27 shows T cell proliferation in long-term co-cultures of NKG2D chimeric two cytokine receptors armored CTL-019 CAR αβT cells co-culture with Raji cells.

[0068] FIG. 28 shows long-term cytotoxicity of NKG2D chimeric two cytokine receptors armored AS67190 CAR αβT cells co-culture with U937 cells.

[0069] FIG. 29 shows T cell proliferation in long-term co-cultures of NKG2D chimeric two cytokine receptors armored AS67190 CAR αβT cells co-culture with U937 cells.

[0070] FIG. 30 shows long-term cytotoxicity of TIGIT chimeric two cytokine receptors armored anti-GPC3 CAR γδT cells co-culture with huh7 cells.

[0071] FIG. 31 shows T cell proliferation in long-term co-cultures of TIGIT chimeric two cytokine receptors armored anti-GPC3 CAR γδT cells co-culture with huh7 cells.

[0072] FIG. 32 shows anti-tumor effect of anti-GPC3 CAR γδT cells or anti-GPC3 CAR γδT cells armored with TIGIT chimeric two cytokine receptors in huh7 xenograft model.

[0073] FIG. 33 shows long-term cytotoxicity of SIRP-α chimeric two cytokine receptors armored AS67190 CAR γδT cells co-culture with U937 cells.

[0074] FIG. 34 shows T cell proliferation in long-term co-cultures of SIRP-α chimeric two cytokine receptors armored AS67190 CAR γδT cells co-culture with U937 cells.

[0075] FIG. 35 shows T cell proliferation of NKG2D CAR or BM CAR αβT cells in culture.

[0076] FIG. 36 shows T cell viability of NKG2D or BM CAR αβT cells in culture.

[0077] FIG. 37 shows long-term cytotoxicity of depleted NKG2D or constitutively active chimeric two cytokine receptors armored BM CAR αβT cells co-culture with huh7 cells.

[0078] FIG. 38 shows T cell proliferation in long-term co-cultures of depleted NKG2D or constitutively active chimeric two cytokine receptors armored BM CAR αβT cells co-culture with huh7 cells.

### 5. DETAILED DESCRIPTION

[0079] The present disclosure is based, in part, on the surprising finding of improved functions and properties of engineered immune cells expressing a chimeric cytokine receptor.

[0080] Modified CAR-T cells have been generated to secrete cytokines to promote their survival and/or greater activity. However, the effect of constitutively or inductively secreting cytokines is systemic and not unique to CAR-T cells. They also induce expansion of endogenous immune cells, such as NK cells, NKT cells, dendritic cells (DCs), macrophages and endogenous CD8 T cells (see Avanzi M. P. et al., Cell Rep. 15; 23 (7): 2130-2141 (2015)). Over-activation of the immune system may be fatal, and thus more desirable and safer engineering armors are needed.

[0081] The present disclosure provides compositions and methods of genetically modifying immune cells to express chimeric cytokine receptors responsive to a ligand, which specifically expressed in tumor cells. When the chimeric cytokine receptors bind to the ligand, downstream intracellular cytokine signals activate and uniquely improve the functional activities of genetically modified immune cells, which avoids extensive activation of the immune system. The engineered cells provided herein exhibit enhanced proliferation and potency for treatment of, e.g., cancers and infectious diseases.

### 5.1. Definitions

[0082] Techniques and procedures described or referenced herein include those that are generally well understood and/or commonly employed using conventional methodology by those skilled in the art, such as, for example, the widely utilized methodologies described in Sambrook et al., Molecular Cloning: A Laboratory Manual (3d ed. 2001); Current Protocols in Molecular Biology (Ausubel et al. eds., 2003); Therapeutic Monoclonal Antibodies: From Bench to Clinic (An ed. 2009); Monoclonal Antibodies: Methods and Protocols (Albitar ed. 2010); and Antibody Engineering Vols 1 and 2 (Kontermann and Dübel eds., 2d ed. 2010). Unless otherwise defined herein, technical and scientific terms used in the present description have the meanings that are commonly understood by those of ordinary skill in the art. For purposes of interpreting this specification, the following description of terms will apply and whenever appropriate, terms used in the singular will also include the plural and vice versa. In the event that any description of a term set forth conflicts with any document incorporated herein by reference, the description of the term set forth below shall control.

[0083] The term “antibody,” “immunoglobulin,” or “Ig” is used interchangeably herein, and is used in the broadest sense and specifically covers, for example, monoclonal antibodies (including agonist, antagonist, neutralizing antibodies, full length or intact monoclonal antibodies), antibody compositions with polyepitopic or monoepitopic specificity, polyclonal or monovalent antibodies, multivalent antibodies, multispecific antibodies (e.g., bispecific antibodies so long as they exhibit the desired biological activity), formed from at least two intact antibodies, single chain antibodies, single domain antiboides (e.g., V_{H}H) and fragments thereof (e.g., domain antibodies). An antibody can be human, humanized, chimeric and/or affinity matured, as well as an antibody from other species, for example, mouse, rabbit, llama, etc. The term “antibody” is intended to include a polypeptide product of B cells within the immunoglobulin class of polypeptides that is able to bind to a specific molecular antigen and is composed of two identical pairs of polypeptide chains, wherein each pair has one heavy chain (about 50-70 kDa) and one light chain (about 25 kDa), each amino-terminal portion of each chain includes a variable region of about 100 to about 130 or more amino acids, and each carboxy-terminal portion of each chain includes a constant region. See, e.g., Antibody Engineering (Borrebaeck ed., 2d ed. 1995); and Kuby, Immunology (3d ed. 1997). Antibodies also include, but are not limited to, synthetic antibodies, recombinantly produced antibodies, single domain antibodies including from Camelidae species (e.g., llama or alpaca) or their humanized variants, intrabodies, anti-idiotypic (anti-Id) antibodies, and functional fragments (e.g., antigen-binding fragments) of any of the above, which refers to a portion of an antibody heavy or light chain polypeptide that retains some or all of the binding activity of the antibody from which the fragment was derived. Non-limiting examples of functional fragments (e.g., antigen-binding fragments) include single-chain Fvs (scFv) (e.g., including monospecific, bispecific, etc.), Fab fragments, F(ab′) fragments, F(ab)₂ fragments, F(ab′)₂ fragments, disulfide-linked Fvs (dsFv), Fd fragments, Fv fragments, diabody, triabody, tetrabody, and minibody. In particular, antibodies provided herein include immunoglobulin molecules and immunologically active portions of immunoglobulin molecules, for example, antigen-binding domains or molecules that contain an antigen-binding site that binds to an antigen (e.g., one or more CDRs of an antibody). Such antibody fragments can be found in, for example, Harlow and Lane, Antibodies: A Laboratory Manual (1989); Mol. Biology and Biotechnology: A Comprehensive Desk Reference (Myers ed., 1995); Huston et al., 1993, Cell Biophysics 22:189-224; Plückthun and Skerra, 1989, Meth. Enzymol. 178:497-515; and Day, Advanced Immunochemistry (2d ed. 1990). The antibodies provided herein can be of any class (e.g., IgG, IgE, IgM, IgD, and IgA) or any subclass (e.g., IgG1, IgG2, IgG3, IgG4, IgA1, and IgA2) of immunoglobulin molecule. Antibodies may be agonistic antibodies or antagonistic antibodies. Antibodies may be neither agonistic nor antagonistic.

[0084] An “antigen” is a structure to which an antibody can selectively bind. A target antigen may be a polypeptide, carbohydrate, nucleic acid, lipid, hapten, or other naturally occurring or synthetic compound. In some embodiments, the target antigen is a polypeptide. In certain embodiments, an antigen is associated with a cell, for example, is present on or in a cell.

[0085] An “intact” antibody is one comprising an antigen-binding site as well as a CL and at least heavy chain constant regions, CH1, CH2 and CH3. The constant regions may include human constant regions or amino acid sequence variants thereof. In certain embodiments, an intact antibody has one or more effector functions.

[0086] “Single-chain Fv” also abbreviated as “sFv” or “scFv” are antibody fragments that comprise the VH and VL antibody domains connected into a single polypeptide chain. Preferably, the scFv polypeptide further comprises a polypeptide linker between the VH and VL domains which enables the scFv to form the desired structure for antigen binding. For a review of the scFv, see Pluckthun in The Pharmacology of Monoclonal Antibodies, vol. 113, Rosenburg and Moore eds., Springer-Verlag, New York, pp. 269-315 (1994).

[0087] “Single domain antibody” or “sdAb” as used herein refers to a single monomeric variable antibody domain and which is capable of antigen binding. Single domain antibodies include V_{H}H domains as described herein. Examples of single domain antibodies include, but are not limited to, antibodies naturally devoid of light chains such as those from Camelidae species (e.g., llama), single domain antibodies derived from conventional 4-chain antibodies, engineered antibodies and single domain scaffolds other than those derived from antibodies. Single domain antibodies may be derived from any species including, but not limited to mouse, human, camel, llama, goat, rabbit, and bovine. For example, a single domain antibody can be derived from antibodies raised in Camelidae species, for example in camel, llama, fromedary, alpaca and guanaco, as described herein. Other species besides Camelidae may produce heavy chain antibodies naturally devoid of light chain; V_{H}Hs derived from such other species are within the scope of the disclosure. In some embodiments, the single domain antibody (e.g., V_{H}H) provided herein has a structure of FR1-CDR1-FR2-CDR2-FR3-CDR3-FR4. Single domain antibodies may be genetically fused or chemically conjugated to another molecule (e.g., an agent) as described herein. Single domain antibodies may be part of a bigger binding molecule (e.g., a multispecific antibody or a chimeric antigen receptor).

[0088] The term “binds”, “binding”, “specifically bind to” or is “specific for” refers to measurable and reproducible interactions such as binding between a target and an antibody, which is determinative of the presence of the target in the presence of a heterogeneous population of molecules including biological molecules. For example, an antibody that binds to or specifically binds to a target (which can be an epitope) is an antibody that binds this target with greater affinity, avidity, more readily, and/or with greater duration than it binds to other targets. In one embodiment, the extent of binding of an antibody to an unrelated target is less than about 10% of the binding of the antibody to the target as measured, e.g., by a radioimmunoassay (RIA). In certain embodiments, an antibody that specifically binds to a target has a dissociation constant (Kd) of ≤1 μM, ≤100 nM, ≤10 nM, ≤1 nM, or ≤0.1 nM. In certain embodiments, an antibody specifically binds to an epitope on a protein that is conserved among the protein from different species. In some embodiment, specific binding can include, but does not require exclusive binding. In another embodiment, the term “binds” or “binding” refer to an interaction between molecules including, for example, to form a complex.

[0089] As used herein, an “epitope” is a term in the art and refers to a localized region of an antigen to which a binding molecule (e.g., an antibody comprising a single chain antibody sequence) can specifically bind. An epitope can be a linear epitope or a conformational, non-linear, or discontinuous epitope. In the case of a polypeptide antigen, for example, an epitope can be contiguous amino acids of the polypeptide (a “linear” epitope) or an epitope can comprise amino acids from two or more non-contiguous regions of the polypeptide (a “conformational,” “non-linear” or “discontinuous” epitope). It will be appreciated by one of skill in the art that, in general, a linear epitope may or may not be dependent on secondary, tertiary, or quaternary structure. For example, in some embodiments, a binding molecule binds to a group of amino acids regardless of whether they are folded in a natural three dimensional protein structure. In other embodiments, a binding molecule requires amino acid residues making up the epitope to exhibit a particular conformation (e.g., bend, twist, turn or fold) in order to recognize and bind the epitope.

[0090] “Percent (%) amino acid sequence identity” and “homology” with respect to a peptide, polypeptide or antibody sequence is defined as the percentage of amino acid residues in a candidate sequence that is identical with the amino acid residues in the specific peptide or polypeptide sequence, after aligning the sequences and introducing gaps, if necessary, to achieve the maximum percent sequence identity, and not considering any conservative substitutions as part of the sequence identity. Alignment for purposes of determining percent amino acid sequence identity can be achieved in various ways that are within the skill in the art, for instance, using publicly available computer software such as BLAST, BLAST-2, ALIGN or MEGALIGN™ (DNASTAR) software. Those skilled in the art can determine appropriate parameters for measuring alignment, including any algorithms needed to achieve maximal alignment over the full length of the sequences being compared.

[0091] The term “chimeric cytokine receptor” or CCR as used herein is a molecule which comprises a cytokine receptor endodomain transmembrane and a heterologous ligand-binding exodomain. The heterologous exodomain binds a ligand other than the cytokine for which the cytokine receptor from which the endodomain was derived is selective. In this way, it is possible to alter the ligand specificity of a cytokine receptor by grafting on a heterologous binding specificity.

[0092] In some embodiments, CCR comprising transmembrane domain comprises a Janus Kinase (JAK)-binding domain. In some embodiments, the JAK-binding domain is derived from a group consisting of EPOR, GHR, TPOR, or a variant thereof. In some embodiments, the JAK-binding domain comprises an amino acid sequence of SEQ ID NO: 7.

[0093] In some embodiments, CCR comprising an intracellular domain derived from a cytokine receptor or of the compositions, e.g., IL2Rα, IL7Rα, IL9R-1, IL9R-2, IL9R-3, IL12Rβ1, IL12Rβ2, IL15Rα, IL15Rβ-1, IL15Rβ-2, IL15Rβ-3, IL18Rα, IL18Rβ, IL21R-1, IL21R-2, IL21R-3, IL10R2, IL22R1, IL23R-1, IL23R-2, IL23R-3, IL27Rα, gp130, IL31RA, OSMRβ, IL36R, IL1RAcP, GM-CSFRα, GM-CSFRβ-1, GM-CSFRβ-2, a variant thereof, or combinations thereof. The chimeric cytokine receptor may further comprises an extracellular domain and a transmembrane domain.

[0094] In some embodiments, CCR comprises an tag comprising an amino acid sequence of SEQ ID NOs: 4, 5 or 158-160, or an amino acid sequence having at least 75%, 80%, 90%, 91%, 92%, 93%, 94%, 95%, 96%, 97%, 98%, or 99% identity to an amino acid sequence selected from SEQ ID NOs: 4, 5 or 158-160.

[0095] The term “functional exogenous receptor” as used herein, refers to an exogenous receptor (e.g., TCR such as a recombinant or engineered TCR, cTCR, TAC-like chimeric receptor, or CAR) that retains its biological activity after being introduced into an immune effector cell such as a T cell. The biological activity include but are not limited to the ability of the exogenous receptor in specifically binding to a molecule, properly transducing downstream signals, such as inducing cellular proliferation, cytokine production and/or performance of regulatory or cytolytic effector functions.

[0096] “Chimeric antigen receptor” or “CAR” as used herein refers to genetically engineered receptors, which can be used to graft one or more antigen specificity onto immune effector cells, such as T cells. Some CARs are also known as “artificial T-cell receptors,” “chimeric T cell receptors,” or “chimeric immune receptors.” A chimeric molecule that includes one or more antigen-binding portion (such as a single domain antibody or scFv) and a signaling domain, such as a signaling domain from a T cell receptor (e.g., CD3ζ). Typically, CARs are comprised of an antigen-binding moiety, a transmembrane domain and an intracellular domain. The intracellular domain typically includes a signaling chain having an immunoreceptor tyrosine-based activation motif (ITAM), such as CD3ζ or FcεRIγ. In some instances, the intracellular domain further includes the intracellular portion of at least one additional co-stimulatory domain, such as CD28, 4-1BB (CD137), ICOS, OX40 (CD134), CD27, and/or hematopoietic cell signal transducer (DAP10). In the context of the present application, the terms “cytoplasmic domain”, “intracellular domain” and “intracellular signaling domain” are interchangeable. In some embodiments, the CAR comprises an extracellular antigen binding domain specific for one or more antigens (such as tumor antigens), a transmembrane domain, and an intracellular signaling domain of a T cell and/or other receptors. In some embodiments, the CAR is single CAR. In some embodiments, the CAR is dual CAR. In some embodiments, the CAR is tandem CAR. In some embodiments, the CAR is split CAR. “CAR-T cell” refers to a T cell that expresses a CAR. The term “single CAR” as used herein is included as a chimeric molecule that includes a single antigen-binding portion (such as a single domain antibody or scFv) and a signaling domain, such as a signaling domain from a T cell receptor (e.g., CD3ζ). Typically, single CARs may comprise a monospecific antigen-binding moiety, a transmembrane domain, and an intracellular domain.

[0097] The term “tandem CAR” as used herein is included as a chimeric molecule that includes more than one antigen-binding portions (such as 2, 4, or 6 single domain antibodies or scFv) and a signaling domain, such as a signaling domain from a T cell receptor (e.g., CD3ζ). Typically, tandem CARs may comprise monospecific, bivalent antigen-binding moiety, e.g., two identical V_{H}H domains binding GPC3, or multi-specific, e.g., bispecific bivalent, antigen-binding moiety, e.g., two different V_{H}H domains binding GPC3 or one V_{H}H domain binding GPC3 and the other V_{H}H domain binding a molecule other than GPC3, a transmembrane domain, and an intracellular domain. In some embodiments, the tandem CAR of the present disclosure may include an extracellular antigen binding domain further comprising a second binding domain that binds to a second antigen, and the second antigen is different from the GPC3.

[0098] The term “dual CAR” as used herein is included as two separate CARs that may be bispecific, or two tandem CARs that each CAR may be monospecific or bispecific, or one single CAR and one tandem CAR that may be monospecific or bispecific. A dual CAR may have each of a first CAR and a second CAR having both co-stimulatory domain, such as CD28, 4-1BB (CD137), ICOS, OX40 (CD134), CD27, and DAP10, and a signaling domain, such as a signaling domain from a T cell receptor (e.g., CD3ζ). Dual CAR can be a combination of any two anti-GPC3 CARs, in which each of a first CAR and a second CAR may be a single CAR or a tandem CAR, i.e., single CAR/single CAR, single CAR/tandem CAR, or tandem CAR/tandem CAR. The levels of dual CAR T cell signalling may be regulated by manipulating the intracellular domains of each first and second CARs. For example, the intracellular domains of each of the first CAR and the second CAR may comprise a co-stimulatory domain, such as CD28, CD137 (4-1BB), ICOS, OX40 (CD134), CD27, and/or DAP10, and/or a signaling domain from a T cell receptor, such as a signaling domain from a T cell receptor (e.g., CD3ζ). For example, dual CAR of the present disclosure may include a first CAR and a second CAR each having an intracellular domain comprising a co-stimulatory domain and a signaling domain from a T cell receptor. Thus, when dual CAR bind antigens (e.g., bispecific), the T cell signals may be transmitted through two signaling domains from a T cell receptor.

[0099] The term “split CAR” as used herein is different from dual CAR, in split CAR, a first CAR may comprise a co-stimulatory domain but lack a signaling domain from a T cell receptor; and a second CAR may comprises signaling domain from a T cell receptor but lack co-stimulatory domain. In some embodiments, the split CAR system of the present disclosure may include a first intracellular signaling domain comprising a primary intracellular signaling domain of an immune effector cell and a second intracellular signaling domain comprising a co-stimulatory signaling domain.

[0100] The term “recombinant or engineered TCR” as used herein is included as a kind of functional exogenous receptor provided herein, and refers to peptide expressed into an immune cell. The functions of recombinant or engineered TCR may include for example redirecting immune activity of the immune cell against a desired type of cells, such as cancer and infected cells having specific markers at their surface. It can replace or be-co-expressed with the endogenous TCR. In some embodiments, such recombinant TCR are single-chain TCRs comprising an open reading frame where the variable Vα and Vβ domains are paired with a protein linker. This involves the molecular cloning of the TCR genes known to be specific for an antigen of choice. These chains are then introduced into T cells usually by means of a retroviral vector. Consequently, expression of the cloned TCRα and TCRβ genes endows the transduced T cell with a functional specificity determined by the pairing of these new genes. A component of a recombinant or engineered TCR is any functional subunit of a TCR, such as a recombined TCRα and TCRβ, which is encoded by an exogenous polynucleotide sequence introduced into the cell.

[0101] In some embodiments, the functional exogenous receptor provided herein is a chimeric TCR (cTCR), which has both antigen-binding and T-cell activating functions. For example, a cTCR can comprise: (a) an extracellular ligand binding domain comprising an antigen-binding fragment (e.g., sdAb, scFv) that specifically recognizes one or more epitopes of a tumor antigen (e.g., GPC3, CD19 or CLL1); (b) an optional linker; (c) an optional extracellular domain of a first TCR subunit (e.g., CD3ε) or a portion thereof, (d) a transmembrane domain comprising a transmembrane domain of a second TCR subunit (e.g., CD3ε); and (e) an intracellular signaling domain comprising an intracellular signaling domain of a third TCR subunit (e.g., CD3ε); wherein the first, second, and third TCR subunit are all selected from the group consisting of TCRα, TCRβ, TCRγ, TCRδ, CD3ε, CD3γ, and CD3δ. In some embodiments, the first, second, and third TCR subunits are the same (e.g., all CD3ε). In some embodiments, the first, second, and third TCR subunits are different. In some embodiments, the cTCR further comprises a hinge domain located between the C-terminus of the extracellular ligand binding domain and the N-terminus of the transmembrane domain. In some embodiments, the hinge domain is derived from CD8α. In some embodiments, the cTCR further comprises a signal peptide located at the N-terminus of the cTCR, such as a signal peptide derived from CD8α.

[0102] In some embodiments, the functional exogenous receptor is a T cell antigen coupler (TAC), e.g., comprising: (a) an extracellular ligand binding domain comprising an antigen-binding fragment (e.g., sdAb, scFv) that specifically recognizes one or more epitopes of a tumor antigen (e.g., GPC3, CD19 or CLL1); (b) an optional first linker; (c) an extracellular TCR binding domain that specifically recognizes the extracellular domain of a TCR subunit (e.g., CD3ε); (d) an optional second linker; (e) an optional extracellular domain of a first TCR co-receptor (e.g., CD4) or a portion thereof; (f) a transmembrane domain comprising a transmembrane domain of a second TCR co-receptor (e.g., CD4); and (g) an optional intracellular signaling domain comprising an intracellular signaling domain of a third TCR co-receptor (e.g., CD4); wherein the TCR subunit is selected from the group consisting of TCRα, TCRβ, TCRγ, TCRδ, CD3ε, CD3γ, and CD3δ; and wherein the first, second, and third TCR co-receptors are all selected from the group consisting of CD4, CD8, and CD28. In some embodiments, the first, second, and third TCR co-receptors are the same. In some embodiments, the first, second, and third TCR co-receptors are different. In some embodiments, the TAC further comprises a hinge domain located between the C-terminus of the extracellular ligand binding domain and the N-terminus of the transmembrane domain. In some embodiments, the hinge domain is derived from CD8α. In some embodiments, the TAC further comprises a signal peptide located at the N-terminus of the TAC, such as a signal peptide derived from CD8α. In some embodiments, the extracellular ligand binding domain is at N-terminal of the extracellular TCR binding domain. In some embodiments, the extracellular ligand binding domain is at C-terminal of the extracellular TCR binding domain.

[0103] In some embodiments, the functional exogenous receptor is a TAC-like chimeric receptor, e.g., comprising: (a) an extracellular ligand binding domain comprising an antigen-binding fragment (e.g., sdAb, scFv) that specifically recognizes one or more epitopes of a tumor antigen (e.g., GPC3); (b) an optional first linker; (c) an extracellular TCR binding domain that specifically recognizes the extracellular domain of a first TCR subunit (e.g., TCRα); (d) an optional second linker; (e) an optional extracellular domain of a second TCR subunit (e.g., CD3ε) or a portion thereof; (f) a transmembrane domain comprising a transmembrane domain of a third TCR subunit (e.g., CD3ε); and (g) an optional intracellular signaling domain comprising an intracellular signaling domain of a fourth TCR subunit (e.g., CD3ε); wherein the first, second, third, and fourth TCR subunits are all selected from the group consisting of TCRα, TCRβ, TCRγ, TCRδ, CD3ε, CD3γ, and CD3δ. In some embodiments, the second, third, and fourth TCR subunits are the same. In some embodiments, the first, second, third, and fourth TCR subunits are the same. In some embodiments, the first, second, third, and fourth TCR subunits are different. In some embodiments, the second, third, and fourth TCR subunits are the same, but different from the first TCR subunit. In some embodiments, the extracellular ligand binding domain is at N-terminal of the extracellular TCR binding domain. In some embodiments, the extracellular ligand binding domain is at C-terminal of the extracellular TCR binding domain. In some embodiments, the TAC-like chimeric receptor further comprises a hinge domain located between the C-terminus of the extracellular ligand binding domain and the N-terminus of the transmembrane domain. In some embodiments, the hinge domain is derived from CD8α. In some embodiments, the TAC-like chimeric receptor further comprises a signal peptide located at the N-terminus of the TAC-like chimeric receptor, such as a signal peptide derived from CD8α.

[0104] The terms “polypeptide” and “peptide” and “protein” are used interchangeably herein and refer to polymers of amino acids of any length. The polymer may be linear or branched, it may comprise modified amino acids, and it may be interrupted by non-amino acids. The terms also encompass an amino acid polymer that has been modified naturally or by intervention; for example, disulfide bond formation, glycosylation, lipidation, acetylation, phosphorylation, or any other manipulation or modification. Also included within the definition are, for example, polypeptides containing one or more analogs of an amino acid, including but not limited to, unnatural amino acids, as well as other modifications known in the art. It is understood that, because the polypeptides of this disclosure may be based upon antibodies or other members of the immunoglobulin superfamily, in certain embodiments, a “polypeptide” can occur as a single chain or as two or more associated chains.

[0105] “Polynucleotide” or “nucleic acid,” as used interchangeably herein, refers to polymers of nucleotides of any length and includes DNA and RNA. The nucleotides can be deoxyribonucleotides, ribonucleotides, modified nucleotides or bases, and/or their analogs, or any substrate that can be incorporated into a polymer by DNA or RNA polymerase or by a synthetic reaction. A polynucleotide may comprise modified nucleotides, such as methylated nucleotides and their analogs. “Oligonucleotide,” as used herein, refers to short, generally single-stranded, synthetic polynucleotides that are generally, but not necessarily, fewer than about 200 nucleotides in length. The terms “oligonucleotide” and “polynucleotide” are not mutually exclusive. The description above for polynucleotides is equally and fully applicable to oligonucleotides. A cell that produces a binding molecule of the present disclosure may include a parent hybridoma cell, as well as bacterial and eukaryotic host cells into which nucleic acids encoding the antibodies have been introduced.

[0106] An “isolated nucleic acid” is a nucleic acid, for example, an RNA, DNA, or a mixed nucleic acids, which is substantially separated from other genome DNA sequences as well as proteins or complexes such as ribosomes and polymerases, which naturally accompany a native sequence. An “isolated” nucleic acid molecule is one which is separated from other nucleic acid molecules which are present in the natural source of the nucleic acid molecule. Moreover, an “isolated” nucleic acid molecule, such as a cDNA molecule, can be substantially free of other cellular material, or culture medium when produced by recombinant techniques, or substantially free of chemical precursors or other chemicals when chemically synthesized. In a specific embodiment, one or more nucleic acid molecules encoding a single chain antibody or an antibody as described herein are isolated or purified. The term embraces nucleic acid sequences that have been removed from their naturally occurring environment, and includes recombinant or cloned DNA isolates and chemically synthesized analogues or analogues biologically synthesized by heterologous systems. A substantially pure molecule may include isolated forms of the molecule. Specifically, an “isolated” nucleic acid molecule encoding a CAR or CAR armored CCR described herein is a nucleic acid molecule that is identified and separated from at least one contaminant nucleic acid molecule with which it is ordinarily associated in the environment in which it was produced.

[0107] The term “vector” refers to a substance that is used to carry or include a nucleic acid sequence, including for example, a nucleic acid sequence encoding a binding molecule (e.g., an antibody) as described herein, in order to introduce a nucleic acid sequence into a host cell. Vectors applicable for use include, for example, expression vectors, plasmids, phage vectors, viral vectors, episomes, and artificial chromosomes, which can include selection sequences or markers operable for stable integration into a host cell's chromosome. Additionally, the vectors can include one or more selectable marker genes and appropriate expression control sequences. Expression control sequences can include constitutive and inducible promoters, transcription enhancers, transcription terminators, and the like, which are well known in the art. When two or more nucleic acid molecules are to be co-expressed (e.g., both an antibody heavy and light chain or an antibody VH and VL), both nucleic acid molecules can be inserted, for example, into a single expression vector or in separate expression vectors. For single vector expression, the encoding nucleic acids can be operationally linked to one common expression control sequence or linked to different expression control sequences, such as one inducible promoter and one constitutive promoter. The introduction of nucleic acid molecules into a host cell can be confirmed using methods well known in the art. Such methods include, for example, nucleic acid analysis such as Northern blots or polymerase chain reaction (PCR) amplification of mRNA, immunoblotting for expression of gene products, or other suitable analytical methods to test the expression of an introduced nucleic acid sequence or its corresponding gene product. It is understood by those skilled in the art that expression levels can be optimized to obtain sufficient expression using methods well known in the art.

[0108] The term “host” as used herein refers to an animal, such as a mammal (e.g., a human).

[0109] The term “host cell” as used herein refers to a particular subject cell that may be transfected with a nucleic acid molecule and the progeny or potential progeny of such a cell. Progeny of such a cell may not be identical to the parent cell transfected with the nucleic acid molecule due to mutations or environmental influences that may occur in succeeding generations or integration of the nucleic acid molecule into the host cell genome.

[0110] As used herein, the term “autologous” is meant to refer to any material derived from the same individual to whom it is later to be re-introduced into the individual.

[0111] “Allogeneic” refers to a graft derived from a different individual of the same species.

[0112] The term “transfected” or “transformed” or “transduced” as used herein refers to a process by which exogenous nucleic acid is transferred or introduced into the host cell. A “transfected” or “transformed” or “transduced” cell is one which has been transfected, transformed or transduced with exogenous nucleic acid. The cell includes the primary subject cell and its progeny.

[0113] The term “immune response” used here is included a response of a cell of the immune system, such as a B cell, T cell, or monocyte, to a stimulus. In some embodiments, the response is specific for a particular antigen (an “antigen-specific response”). In some embodiments, an immune response is a T cell response, such as a CD4⁺ response or a CD8⁺response. In another embodiment, the response is a B cell response, and results in the production of specific antibodies.

[0114] The term “pharmaceutically acceptable” as used herein means being approved by a regulatory agency of the Federal or a state government, or listed in United States Pharmacopeia, European Pharmacopeia, or other generally recognized Pharmacopeia for use in animals, and more particularly in humans. In one embodiment, each component is “pharmaceutically acceptable” in the sense of being compatible with the other ingredients of a pharmaceutical formulation, and suitable for use in contact with the tissue or organ of humans and animals without excessive toxicity, irritation, allergic response, immunogenicity, or other problems or complications, commensurate with a reasonable benefit/risk ratio. See, e.g., Lippincott Williams & Wilkins: Philadelphia, P A, 2005; Handbook of Pharmaceutical Excipients, 6th ed.; Rowe et al., Eds.; The Pharmaceutical Press and the American Pharmaceutical Association: 2009; Handbook of Pharmaceutical Additives, 3rd ed.; Ash and Ash Eds.; Gower Publishing Company: 2007; Pharmaceutical Preformulation and Formulation, 2nd ed.; Gibson Ed.; CRC Press LLC: Boca Raton, F L, 2009. In some embodiments, pharmaceutically acceptable excipients are nontoxic to the cell or mammal being exposed thereto at the dosages and concentrations employed. In some embodiments, a pharmaceutically acceptable excipient is an aqueous pH buffered solution.

[0115] “Carrier” or “Excipient” means a pharmaceutically-acceptable material, composition, or vehicle, such as a liquid or solid filler, diluent, solvent, or encapsulating material. Excipients include, for example, encapsulating materials or additives such as absorption accelerators, antioxidants, binders, buffers, carriers, coating agents, coloring agents, diluents, disintegrating agents, emulsifiers, extenders, fillers, flavoring agents, humectants, lubricants, perfumes, preservatives, propellants, releasing agents, sterilizing agents, sweeteners, solubilizers, wetting agents and mixtures thereof. The term “excipient” can also refer to a diluent, adjuvant (e.g., Freunds' adjuvant (complete or incomplete) or vehicle).

[0116] The term “effective amount” or “therapeutically effective amount” as used herein refers to the amount of engineered immune effector cells or a therapeutic molecule comprising an agent and the engineered immune effector cells or pharmaceutical composition provided herein which is sufficient to result in the desired outcome.

[0117] The terms “subject” and “patient” may be used interchangeably. As used herein, in certain embodiments, a subject is a mammal, such as a non-primate or a primate (e.g., human). In specific embodiments, the subject is a human. In one embodiment, the subject is a mammal, e.g., a human, diagnosed with a disease or disorder. In another embodiment, the subject is a mammal, e.g., a human, at risk of developing a disease or disorder.

[0118] “Administer” or “administration” refers to the act of injecting or otherwise physically delivering a substance as it exists outside the body into a patient, such as by mucosal, intradermal, intravenous, intramuscular delivery, and/or any other method of physical delivery described herein or known in the art.

[0119] As used herein, the terms “treat,” “treatment” and “treating” refer to the reduction or amelioration of the progression, severity, and/or duration of a disease or condition resulting from the administration of one or more therapies. Treating may be determined by assessing whether there has been a decrease, alleviation and/or mitigation of one or more symptoms associated with the underlying disorder such that an improvement is observed with the patient, despite that the patient may still be afflicted with the underlying disorder. The term “treating” includes both managing and ameliorating the disease.

[0120] The terms “manage”, “managing” and “management” refer to the beneficial effects that a subject derives from a therapy which does not necessarily result in a cure of the disease.

[0121] The terms “prevent”, “preventing” and “prevention” refer to reducing the likelihood of the onset (or recurrence) of a disease, disorder, condition, or associated symptom(s) (e.g., a cancer).

[0122] As used herein, “delaying” the development of cancer means to defer, hinder, slow, retard, stabilize, and/or postpone development of the disease. This delay can be of varying lengths of time, depending on the history of the disease and/or individual being treated. As is evident to one skilled in the art, a sufficient or significant delay can, in effect, encompass prevention, in that the individual does not develop the disease. A method that “delays” development of cancer is a method that reduces probability of disease development in a given time frame and/or reduces the extent of the disease in a given time frame, when compared to not using the method. Such comparisons are typically based on clinical studies, using a statistically significant number of individuals. Cancer development can be detectable using standard methods, including, but not limited to, computerized axial tomography (CAT Scan), Magnetic Resonance Imaging (MRI), abdominal ultrasound, clotting tests, arteriography, or biopsy. Development may also refer to cancer progression that may be initially undetectable and includes occurrence, recurrence, and onset.

[0123] The terms “about” and “approximately” mean within 20%, within 15%, within 10%, within 9%, within 8%, within 7%, within 6%, within 5%, within 4%, within 3%, within 2%, within 1%, or less of a given value or range.

[0124] As used in the present disclosure and claims, the singular forms “a”, “an” and “the” include plural forms unless the context clearly dictates otherwise.

[0125] It is understood that wherever embodiments are described herein with the term “comprising” otherwise analogous embodiments described in terms of “consisting of” and/or “consisting essentially of” are also provided. It is also understood that wherever embodiments are described herein with the phrase “consisting essentially of” otherwise analogous embodiments described in terms of “consisting of” are also provided.

[0126] The term “between” as used in a phrase as such “between A and B” or “between A-B” refers to a range including both A and B.

[0127] The term “and/or” as used in a phrase such as “A and/or B” herein is intended to include both A and B; A or B; A (alone); and B (alone). Likewise, the term “and/or” as used in a phrase such as “A, B, and/or C” is intended to encompass each of the following embodiments: A, B, and C; A, B, or C; A or C; A or B; B or C; A and C; A and B; B and C; A (alone); B (alone); and C (alone).

### 5.2. Engineered Immune Effector Cells

[0128] As shown in Section 6 below, introducing a chimeric cytokine receptor into immune effector cells expressing one or more functional exogenous receptor(s) can significantly improves properties/functions of the immune effector cells. In some embodiments, an immune effector cell expressing (i) a chimeric cytokine receptor comprising (a) a first extracellular antigen binding domain, wherein the first extracellular antigen binding domain is derived from NKG2D, truncated NKG2D, antibody or antigen binding fragment thereof targeting NKG2D ligands, TIGIT or SIRP-a, or a variant thereof, (b) a first transmembrane domain, and (c) a cytokine receptor intracellular domain; and (ii) optionally a functional exogenous receptor comprising (a) a second extracellular antigen binding domain, (b) a second transmembrane domain, and (c) an intracellular signaling domain.

[0129] Thus, in one aspect, provided herein are host cells (such as immune effector cells) comprising a chimeric cytokine receptor comprising (a) a first extracellular antigen binding domain, (b) a first transmembrane domain, and (c) a cytokine receptor intracellular domain. In some embodiments, the extracellular domain is derived from the extracellular domain of NKG2D or a variant thereof. In some embodiments, the extracellular antigen binding domain comprises the amino acid sequence of SEQ ID NO: 6. In some embodiments, the first extracellular antigen binding domain is derived from truncated NKG2D. In some embodiments, the first extracellular antigen binding domain is derived from truncated NKG2D (amino acid positions 89-216, SEQ ID NO: 157). In some embodiments, the first extracellular antigen binding domain is derived from truncated NKG2D (amino acid positions 98-216, SEQ ID NO: 156). In some embodiments, the extracellular antigen binding domain comprises an amino acid sequence having at least 75%, 80%, 85%, 90%, 91%, 92%, 93%, 94%, 95%, 96%, 97%, 98%, or 99% identity to SEQ ID NO: 6, 156 or 157.

[0130] In other embodiments, the extracellular domain comprises an antibody or antigen binding fragment thereof that binds to an NKG2D ligand. In some embodiments, the extracelluar domain comprises one or more scFv(s) that bind to an NKG2D ligand. In other embodiments, the extracellular domain comprises one or more sdAb(s) (such as one or more V_{H}H domains) that bind to an NKG2D ligand. The NKG2D ligand can be selected from (but not limited to) a group consisting of MICA/B, ULBP-1, ULBP-2,5,6 and ULBP-3.

[0131] In some embodiments, immune effector cell comprises the amino acid sequence of SEQ ID NOs: 29, 135, 141, 143 or 149 or an amino acid sequence having at least 75%, 80%, 85%, 90%, 91%, 92%, 93%, 94%, 95%, 96%, 97%, 98%, or 99% identity to SEQ ID NOs: 29, 135, 141,143 or 149. In some embodiments, immune effector cell comprising the amino acid sequence of SEQ ID NOs: 30-134, 136-140, 142, 144, 146 or 148, or an amino acid sequence having at least 75%, 80%, 85%, 90%, 91%, 92%, 93%, 94%, 95%, 96%, 97%, 98%, or 99% identity to SEQ ID NOs: 30-134, 136-140, 142, 144, 146 or 148. In some embodiments, immune effector cell comprises the amino acid sequence of SEQ ID NOs:150 or 151, or an amino acid sequence having at least 75%, 80%, 85%, 90%, 91%, 92%, 93%, 94%, 95%, 96%, 97%, 98%, or 99% identity to SEQ ID NOs:150 or 151.

[0132] NKG2D is a transmembrane protein belonging to the NKG2 family of C-type lectin-like receptors, and it is also referred to as KLRK1, CD314, D12S2489E, KLR, NKG2-D, NKG2 natural killer group 2D, killer cell lectin-like receptor K1, and killer cell lectin like receptor Kl. NKG2D is encoded by KLRK1 gene which is located in the NK-gene complex (NKC) situated on chromosome 6 in mice and chromosome 12 in humans. In humans, it is expressed by NK cells, γδ T cells and CD8⁺ αβ T cells. NKG2D recognizes induced-self proteins from MIC and RAET1/ULBP families which appear on the surface of stressed, malignant transformed, and infected cells. NKG2D ligands are induced-self proteins which are completely absent or present only at low levels on surface of normal cells, but they are overexpressed by infected, transformed, senescent and stressed cells. NKG2D sequences are known in the art (see, e.g., OMIM: 611817, HomoloGene: 136440, GeneCards: KLRK1).

[0133] In some embodiments, the first extracellular antigen binding domain is derived from TIGIT. In some embodiments, the first extracellular antigen binding domain comprises the amino acid sequence of SEQ ID NO: 145. In some embodiments, the first extracellular antigen binding domain is derived from SIRP-α. In some embodiments, the first extracellular antigen binding domain comprises the amino acid sequence of SEQ ID NO: 147.

[0134] In some embodiments, the host cells express one or more functional exogenous receptor(s). The functional exogenous receptors can be, for example, chimeric antigen receptor (CAR), engineered T cell receptor (TCR), chimeric TCR (cTCR), and T cell antigen coupler (TAC)-like chimeric receptor. In some embodiments, the functional exogenous receptor is a CAR. In some embodiments, the functional exogenous receptor is a TCR. In some embodiments, the functional exogenous receptor is cTCR. In yet other embodiments, the functional exogenous receptor is a TAC. Any immune effector cell that can perform immune effector functions may be used in the present disclosure, including but not limited to, peripheral blood mononuclear cells (PBMC), natural killer (NK) cells, monocytes, cytotoxic T cells, neutrophils, and eosinophils.

[0135] In some embodiments, provided herein are host cells, such as immune effector cells, comprising any one of the polypeptides, polynucleotides, or vectors described herein, for example, as provided in the following sections.

### 5.2.1. Chimeric Cytokine Receptor

[0136] In one aspect, provided herein is a chimeric cytokine receptor comprising an intracellular domain derived from one or more cytokine receptor(s), i.e., cytokine receptor intracellular domain. The chimeric cytokine receptor provided herein also comprises an extracellular domain and a transmembrane domain.

### Cytokine Receptor Intracellular Domain

[0137] In some embodiments, the cytokine receptors employed in the present chimeric cytokine receptors are selected from a group consisting IL2Rα, IL7Rα, IL9R-1, IL9R-2, IL9R-3, IL12Rβ1, IL12Rβ2, IL15Rα, IL15Rβ-1, IL15Rβ-2, IL15Rβ-3, IL18Rα, IL18Rβ, IL21R-1, IL21R-2, IL21R-3, IL10R2, IL22R1, IL23R-1, IL23R-2, IL23R-3, IL27Rα, gp130, IL31RA, OSMRβ, IL36R, IL1RAcP, GM-CSFRα, GM-CSFRβ-1, GM-CSFRβ-2, a variant thereof, and combinations thereof.

[0138] In some embodiments, the chimeric cytokine receptor provided herein comprises an intracellular domain comprising a region derived from IL2Rα. In some embodiments, the chimeric cytokine receptor provided herein comprises an intracellular domain comprising a region derived from IL7Rα. In some embodiments, the chimeric cytokine receptor provided herein comprises an intracellular domain comprising a region derived from IL9R-1. In some embodiments, the chimeric cytokine receptor provided herein comprises an intracellular domain comprising a region derived from IL9R-2. In some embodiments, the chimeric cytokine receptor provided herein comprises an intracellular domain comprising a region derived from IL9R-3. In some embodiments, the chimeric cytokine receptor provided herein comprises an intracellular domain comprising a region derived from IL12Rβ1. In some embodiments, the chimeric cytokine receptor provided herein comprises an intracellular domain comprising a region derived from IL12Rβ2. In some embodiments, the chimeric cytokine receptor provided herein comprises an intracellular domain comprising a region derived from IL15Rα. In some embodiments, the chimeric cytokine receptor provided herein comprises an intracellular domain comprising a region derived from IL15Rβ-1. In some embodiments, the chimeric cytokine receptor provided herein comprises an intracellular domain comprising a region derived from IL15Rβ-2. In some embodiments, the chimeric cytokine receptor provided herein comprises an intracellular domain comprising a region derived from IL15Rβ-3. In some embodiments, the chimeric cytokine receptor provided herein comprises an intracellular domain comprising a region derived from IL-18Rα. In some embodiments, the chimeric cytokine receptor provided herein comprises an intracellular domain comprising a region derived from IL18Rβ. In some embodiments, the chimeric cytokine receptor provided herein comprises an intracellular domain comprising a region derived from IL21R-1. In some embodiments, the chimeric cytokine receptor provided herein comprises an intracellular domain comprising a region derived from IL21R-2. In some embodiments, the chimeric cytokine receptor provided herein comprises an intracellular domain comprising a region derived from IL21R-3. In some embodiments, the chimeric cytokine receptor provided herein comprises an intracellular domain comprising a region derived from IL-10R2. In some embodiments, the chimeric cytokine receptor provided herein comprises an intracellular domain comprising a region derived from IL22R1. In some embodiments, the chimeric cytokine receptor provided herein comprises an intracellular domain comprising a region derived from IL23R-1. In some embodiments, the chimeric cytokine receptor provided herein comprises an intracellular domain comprising a region derived from IL23R-2. In some embodiments, the chimeric cytokine receptor provided herein comprises an intracellular domain comprising a region derived from IL23R-3. In some embodiments, the chimeric cytokine receptor provided herein comprises an intracellular domain comprising a region derived from IL-27Rα. In some embodiments, the chimeric cytokine receptor provided herein comprises an intracellular domain comprising a region derived from gp130. In some embodiments, the chimeric cytokine receptor provided herein comprises an intracellular domain comprising a region derived from IL3IRA. In some embodiments, the chimeric cytokine receptor provided herein comprises an intracellular domain comprising a region derived from OSMRβ. In some embodiments, the chimeric cytokine receptor provided herein comprises an intracellular domain comprising a region derived from IL36R. In some embodiments, the chimeric cytokine receptor provided herein comprises an intracellular domain comprising a region derived from IL1RAcP. In some embodiments, the chimeric cytokine receptor provided herein comprises an intracellular domain comprising a region derived from GM-CSFRα. In some embodiments, the chimeric cytokine receptor provided herein comprises an intracellular domain comprising a region derived from GM-CSFRβ-1. In some embodiments, the chimeric cytokine receptor provided herein comprises an intracellular domain comprising a region derived from GM-CSFRβ-2.

[0139] In some embodiments, the intracellular domain of the chimeric cytokine receptor provided herein comprises sequences from two or more (such as 2, 3, 4, 5 or more) of IL2Rα, IL7Rα, IL9R-1, IL9R-2, IL9R-3, IL12Rβ1, IL12Rβ2, IL15Rα, IL15Rβ-1, IL15Rβ-2, IL15Rβ-3, IL18Rα, IL18Rβ, IL21R-1, IL21R-2, IL21R-3, IL10R2, IL22R1, IL23R-1, IL23R-2, IL23R-3, IL27Rα, gp130, IL31RA, OSMRβ, TL36R, IL1RAcP, GM-CSFRα, GM-CSFRβ-1, GM-CSFRβ-2, a variant thereof, or combinations thereof.

[0140] For example, in some embodiments, the intracellular domain of the chimeric cytokine receptor provided herein comprises a region derived from IL2Ra and a region derived from IL7Rα, IL2Rα, IL9R-1, IL9R-2, IL9R-3, IL12Rβ1, IL12Rβ2, IL15Rα, IL15Rβ-1, IL15Rβ-2, IL15Rβ-3, IL18Rα, IL18Rβ, IL21R-1, IL21R-2, IL21R-3, IL10R2, IL22R1, IL23R-1, IL23R-2, IL23R-3, IL27Rα, gp130, IL31RA, OSMRβ, IL36R, IL1RAcP, GM-CSFRα, GM-CSFRβ-1, GM-CSFRβ-2, a variant thereof, or combinations thereof. For example, in some embodiments, the intracellular domain of the chimeric cytokine receptor provided herein comprises a region derived from IL7Ra and a region derived from IL9R-1, IL9R-2, IL9R-3, IL12RP 1, IL12Rβ2, IL15Rα, IL15Rβ-1, IL15Rβ-2, IL15Rβ-3, IL18Rα, IL18Rβ, IL21R-1, IL21R-2, IL21R-3, IL10R2, IL22R1, IL23R-1, IL23R-2, IL23R-3, IL27Rα, gp130, IL31RA, OSMRβ, IL36R, IL1RAcP, GM-CSFRα, GM-CSFRβ-1, GM-CSFRβ-2, a variant thereof, or combinations thereof. For example, in some embodiments, the intracellular domain of the chimeric cytokine receptor provided herein comprises a region derived from IL9R-1 and a region derived from IL9R-2, IL9R-3, IL12Rβ1, IL12Rβ2, IL15Rα, IL15Rβ-1, IL15Rβ-2, IL15Rβ-3, IL18Rα, IL18Rβ, IL21R-1, IL21R-2, IL21R-3, IL10R2, IL22R1, IL23R-1, IL23R-2, IL23R-3, IL27Rα, gp130, IL31RA, OSMRβ, IL36R, IL1RAcP, GM-CSFRα, GM-CSFRβ-1, GM-CSFRβ-2, a variant thereof, or combinations thereof. For example, in some embodiments, the intracellular domain of the chimeric cytokine receptor provided herein comprises a region derived from IL9R-2 and a region derived from IL9R-3, IL12Rβ1, IL12Rβ2, IL15Rα, IL15Rβ-1, IL15Rβ-2, IL15Rβ-3, IL18Rα, IL18Rβ, IL21R-1, IL21R-2, IL21R-3, IL10R2, IL22R1, IL23R-1, IL23R-2, IL23R-3, IL27Rα, gp130, IL31RA, OSMRβ, IL36R, IL1RAcP, GM-CSFRα, GM-CSFRβ-1, GM-CSFRβ-2, a variant thereof, or combinations thereof. For example, in some embodiments, the intracellular domain of the chimeric cytokine receptor provided herein comprises a region derived from IL9R-3 and a region derived from IL12Rβ1, IL12Rβ2, IL15Rα, IL15Rβ-1, IL15Rβ-2, IL15Rβ-3, IL18Rα, IL18Rβ, IL21R-1, IL21R-2, IL21R-3, IL10R2, IL22R1, IL23R-1, IL23R-2, IL23R-3, IL27Rα, gp130, IL31RA, OSMRβ, IL36R, IL1RAcP, GM-CSFRα, GM-CSFRβ-1, GM-CSFRβ-2, a variant thereof, or combinations thereof. For example, in some embodiments, the intracellular domain of the chimeric cytokine receptor provided herein comprises a region derived from IL12Rβ1 and a region derived from IL12Rβ2, IL15Rα, IL15Rβ-1, IL15Rβ-2, IL15Rβ-3, IL18Rα, IL18Rβ, IL21R-1, IL21R-2, IL21R-3, IL10R2, IL22R1, IL23R-1, IL23R-2, IL23R-3, IL27Rα, gp130, IL31RA, OSMRβ, IL36R, IL1RAcP, GM-CSFRα, GM-CSFRβ-1, GM-CSFRβ-2, a variant thereof, or combinations thereof. For example, in some embodiments, the intracellular domain of the chimeric cytokine receptor provided herein comprises a region derived from IL12Rβ2 and a region derived from IL15Rα, IL15Rβ-1, IL15Rβ-2, IL15Rβ-3, IL18Rα, IL18Rβ, IL21R-1, IL21R-2, IL21R-3, IL10R2, IL22R1, IL23R-1, IL23R-2, IL23R-3, IL27Rα, gp130, IL31RA, OSMRβ, IL36R, IL1RAcP, GM-CSFRα, GM-CSFRβ-1, GM-CSFRβ-2, or a variant thereof, or combinations thereof. For example, in some embodiments, the intracellular domain of the chimeric cytokine receptor provided herein comprises a region derived from IL15Ra and a region derived from IL15Rβ-1, IL15Rβ-2, IL15Rβ-3, IL18Rα, IL18Rβ, IL21R-1, IL21R-2, IL21R-3, IL10R2, IL22R1, IL23R-1, IL23R-2, IL23R-3, IL27Rα, gp130, IL31RA, OSMRβ, TL36R, IL1RAcP, GM-CSFRα, GM-CSFRβ-1, GM-CSFRβ-2, a variant thereof, or combinations thereof. For example, in some embodiments, the intracellular domain of the chimeric cytokine receptor provided herein comprises a region derived from IL15Rβ-1 and a region derived from IL15Rβ-2, IL15Rβ-3, IL18Rα, IL18Rβ, IL21R-1, IL21R-2, IL21R-3, IL10R2, IL22R1, IL23R-1, IL23R-2, IL23R-3, IL27Rα, gp130, IL31RA, OSMRβ, IL36R, IL1RAcP, GM-CSFRα, GM-CSFRβ-1, GM-CSFRβ-2, a variant thereof, or combinations thereof. For example, in some embodiments, the intracellular domain of the chimeric cytokine receptor provided herein comprises a region derived from IL15Rβ-2 and a region derived from IL15Rβ-3, IL18Rα, IL18Rβ, IL21R-1, IL21R-2, IL21R-3, IL10R2, IL22R1, IL23R-1, IL23R-2, IL23R-3, IL27Rα, gp130, IL31RA, OSMRβ, IL36R, IL1RAcP, GM-CSFRα, GM-CSFRβ-1, GM-CSFRβ-2, a variant thereof, or combinations thereof. For example, in some embodiments, the intracellular domain of the chimeric cytokine receptor provided herein comprises a region derived from IL15Rβ-3 and a region derived from IL18Rα, IL18Rβ, IL21R-1, IL21R-2, IL21R-3, IL10R2, IL22R1, IL23R-1, IL23R-2, IL23R-3, IL27Rα, gp130, IL31RA, OSMRβ, IL36R, IL1RAcP, GM-CSFRα, GM-CSFRβ-1, GM-CSFRβ-2, a variant thereof, or combinations thereof. For example, in some embodiments, the intracellular domain of the chimeric cytokine receptor provided herein comprises a region derived from IL18Ra and a region derived from IL18R, IL18Rβ, IL21R-1, IL21R-2, IL21R-3, IL10R2, IL22R1, IL23R-1, IL23R-2, IL23R-3, IL27Rα, gp130, IL31RA, OSMRβ, IL36R, IL1RAcP, GM-CSFRα, GM-CSFRβ-1, GM-CSFRβ-2, a variant thereof, or combinations thereof. For example, in some embodiments, the intracellular domain of the chimeric cytokine receptor provided herein comprises a region derived from IL18RP and a region derived from IL21R-1 IL21R-2, IL21R-3, IL10R2, IL22R1, IL23R-1, IL23R-2, IL23R-3, IL27Rα, gp130, IL31RA, OSMRβ, IL36R, IL1RAcP, GM-CSFRα, GM-CSFRβ-1, GM-CSFRβ-2, a variant thereof, or combinations thereof. For example, in some embodiments, the intracellular domain of the chimeric cytokine receptor provided herein comprises a region derived from IL21R-1 and a region derived from IL21R-2, IL21R-3, IL10R2, IL22R1, IL23R-1, IL23R-2, IL23R-3, IL27Rα, gp130, IL31RA, OSMRβ, IL36R, IL1RAcP, GM-CSFRα, GM-CSFRβ-1, GM-CSFRβ-2, a variant thereof, or combinations thereof. For example, in some embodiments, the intracellular domain of the chimeric cytokine receptor provided herein comprises a region derived from IL21R-2 and a region derived from, IL21R-3, IL10R2, IL22R1, IL23R-1, IL23R-2, IL23R-3, IL27Rα, gp130, IL31RA, OSMRβ, IL36R, IL1RAcP, GM-CSFRα, GM-CSFRβ-1, GM-CSFRβ-2, a variant thereof, or combinations thereof. For example, in some embodiments, the intracellular domain of the chimeric cytokine receptor provided herein comprises a region derived from IL21R-3 and a region derived from IL10R2, IL22R1, IL23R-1, IL23R-2, IL23R-3, IL27Rα, gp130, IL31RA, OSMRβ, IL36R, IL1RAcP, GM-CSFRα, GM-CSFRβ-1, GM-CSFRβ-2, a variant thereof, or combinations thereof. For example, in some embodiments, the intracellular domain of the chimeric cytokine receptor provided herein comprises a region derived from IL10R2 and a region derived from IL22R1, IL23R-1, IL23R-2, IL23R-3, IL27Rα, gp130, IL31RA, OSMRβ, IL36R, IL1RAcP, GM-CSFRα, GM-CSFRβ-1, GM-CSFRβ-2, a variant thereof, or combinations thereof. For example, in some embodiments, the intracellular domain of the chimeric cytokine receptor provided herein comprises a region derived from IL22R1 and a region derived from IL23R-1, IL23R-2, IL23R-3, IL27Rα, gp130, IL31RA, OSMRβ, IL36R, IL1RAcP, GM-CSFRα, GM-CSFRβ-1, GM-CSFRβ-2, a variant thereof, or combinations thereof. For example, in some embodiments, the intracellular domain of the chimeric cytokine receptor provided herein comprises a region derived from IL22R1 and a region derived from GM-CSFRβ-1, GM-CSFRβ-2, a variant thereof, or combinations thereof. For example, in some embodiments, the intracellular domain of the chimeric cytokine receptor provided herein comprises a region derived from IL23R-1 and a region derived from IL23R-2, IL23R-3, IL27Rα, gp130, IL31RA, OSMRβ, IL36R, IL1RAcP, GM-CSFRα, GM-CSFRβ-1, GM-CSFRβ-2, a variant thereof, or combinations thereof. For example, in some embodiments, the intracellular domain of the chimeric cytokine receptor provided herein comprises a region derived from IL23R-2 and a region derived from IL23R-3, IL27Rα, gp130, IL31RA, OSMRβ, IL36R, IL1RAcP, GM-CSFRα, GM-CSFRβ-1, GM-CSFRβ-2, a variant thereof, or combinations thereof. For example, in some embodiments, the intracellular domain of the chimeric cytokine receptor provided herein comprises a region derived from IL23R-3 and a region derived from IL27Rα, gp130, IL31RA, OSMRβ, IL36R, IL1RAcP, GM-CSFRα, GM-CSFRβ-1, GM-CSFRβ-2, a variant thereof, or combinations thereof. For example, in some embodiments, the intracellular domain of the chimeric cytokine receptor provided herein comprises a region derived from IL27Ra and a region derived from gp130, IL31RA, OSMRβ, IL36R, IL1RAcP, GM-CSFRα, GM-CSFRβ-1, GM-CSFRβ-2, a variant thereof, or combinations thereof. For example, in some embodiments, the intracellular domain of the chimeric cytokine receptor provided herein comprises a region derived from gp130 and a region derived from IL31RA, OSMRβ, IL36R, IL1RAcP, GM-CSFRα, GM-CSFRβ-1, GM-CSFRβ-2, a variant thereof, or combinations thereof. For example, in some embodiments, the intracellular domain of the chimeric cytokine receptor provided herein comprises a region derived from IL3IRA and a region derived from OSMRβ, IL36R, IL1RAcP, GM-CSFRα, GM-CSFRβ-1, GM-CSFRβ-2, a variant thereof, or combinations thereof. For example, in some embodiments, the intracellular domain of the chimeric cytokine receptor provided herein comprises a region derived from OSMRβ and a region derived from IL36R, IL1RAcP, GM-CSFRα, GM-CSFRβ-1, GM-CSFRβ-2, a variant thereof, or combinations thereof. For example, in some embodiments, the intracellular domain of the chimeric cytokine receptor provided herein comprises a region derived from IL36R and a region derived from IL1RAcP, GM-CSFRα, GM-CSFRβ-1, GM-CSFRβ-2, a variant thereof, or combinations thereof. For example, in some embodiments, the intracellular domain of the chimeric cytokine receptor provided herein comprises a region derived from IL1RAcP and a region derived from GM-CSFRα, GM-CSFRβ-1, GM-CSFRβ-2, GM-CSFRβ-1, GM-CSFRβ-2, a variant thereof, or combinations thereof. In some embodiments, the intracellular domain of the chimeric cytokine receptor provided herein comprises a region derived from GM-CSFRβ-1 and a region derived from GM-CSFRβ-2, or a variant thereof.

[0141] In some embodiments, the intracellular domain of the chimeric cytokine receptor provided herein comprises a region derived from IL-7Rα, IL12Rβ1, IL12Rβ2, IL15Rα, IL15Rβ-1, IL15Rβ-2, IL15Rβ-3, IL-18Rα, IL18Rβ, IL21R-1, IL21R-2, IL21R-3, IL23R-1, IL23R-2, IL23R-3, GM-CSFRα, GM-CSFRβ-1, GM-CSFRβ-2, IL9R-1, IL9R-2, IL9R-3, IL-7Rα-IL12Rβ1, IL-7Rα-IL15Rα, IL-7Rα-IL15Rβ-1, IL-7Rα-IL15Rβ-2, IL-7Rα-IL21R-1, IL-7Rα-IL21R-2, IL-7Rα-IL21R-3, IL-7Rα-IL23R-2, IL-7Rα-GMCSFRα, IL-7Rα-GM-CSFRβ-1, IL-7Rα-GM-CSFRβ-2, IL12Rβ1-IL15Rα, IL12Rβ1-IL15Rβ-1, IL12Rβ1-IL15Rβ-2, IL12Rβ1-IL-21R-1, IL12Rβ1-IL-21R-2, IL12Rβ1-IL-21R-3, IL12Rβ1-IL-23R-2, IL12Rβ1-GM-CSFRα, IL12Rβ1-GM-CSFRβ-1, IL12Rβ1-GM-CSFRβ-2, IL12Rβ2-IL15Rα, IL12Rβ2-IL15Rβ-1, IL12Rβ2-IL15Rβ-2, IL12Rβ2-IL-21R-1, IL12Rβ2-IL-21R-2, IL12Rβ2-IL-21R-3, IL12Rβ2-IL-23R-2, IL12Rβ2-GM-CSFRα, IL12Rβ2-GM-CSFRβ-1, IL12Rβ2-GM-CSFRβ-2, IL15Rα-IL-21R-1, IL15Rα-IL-21R-2, IL15Rα-IL-21R-3, IL15Rα-IL-23R-2, IL15Rα-GM-CSFRα, IL15Rα-GM-CSFRβ-1, IL15Rα-GM-CSFRβ-2, IL15Rβ-1-IL-21R-1, L15Rβ-1-IL-21R-2, IL15Rβ-1-IL-21R-3, IL15Rβ-1-IL-23R-2, IL15Rβ-1-GM-CSFRα, IL15Rβ-1-GM-CSFRβ-1, IL15Rβ-1-GM-CSFRβ-2, IL15Rβ-2-IL-21R-1, IL15Rβ-2-IL-21R-2, IL15Rβ-2-IL-21R-3, L15Rβ-2-IL-23R-2, IL15Rβ-2-GM-CSFRα, IL15Rβ-2-GM-CSFRβ-1, IL15Rβ-2-GM-CSFRβ-2, IL-21R-1-IL-23R-2, IL-21R-1-GM-CSFRα, IL-21R-1-GM-CSFRβ-1, IL-21R-1-GM-CSFRβ-2, IL-21R-2-IL-23R-2, IL-21R-2-GM-CSFRα, IL-21R-2-GM-CSFRβ-1, IL-21R-2-GM-CSFRβ-2, IL-21R-3-IL-23R-2, IL-21R-3-GM-CSFRα, IL-21R-3-GM-CSFRβ-1, IL-21R-3-GM-CSFRβ-2, IL-23R-2-GM-CSFRα, IL-23R-2-GM-CSFRβ-1, IL-23R-2-GM-CSFRβ-2, IL-7Rα-IL-9R-2, IL12Rβ1-IL-9R-2, IL12Rβ2-IL-9R-2, IL15Rα-IL-9R-2, IL15Rβ-1-IL-9R-2, IL15Rβ-2-IL-9R-2, IL-21R-1-IL-9R-2, IL-21R-2-IL-9R-2, IL-21R-3-IL-9R-2, IL-23R-2-IL-9R-2, GM-CSFRα-IL-9R-2, GM-CSFRβ-1-IL-9R-2, GM-CSFRβ-2-IL-9R-2, IL-7Rα-IL-12Rβ2, or a variant thereof.

[0142] When the intracellular domain of the chimeric cytokine receptor provided herein comprises sequences from two or more cytokine receptors, these sequences can be in any order. In some embodiments, the cytokine receptor intracellular domain comprises a region having an amino acid sequence selected from SEQ ID NOs: 8-28, or an amino acid sequence having at least 75%, 80%, 90%, 91%, 92%, 93%, 94%, 95%, 96%, 97%, 98%, or 99% identity to an amino acid sequence selected from SEQ ID NOs: 8-28. In a specific embodiment, the cytokine receptor intracellular domain comprises one or more the amino acid sequences of SEQ ID NO: 8, 10, 14-17 or 20-28.

### Transmembrane Domain

[0143] The chimeric cytokine receptors of the present disclosure comprise a transmembrane domain that can be directly or indirectly fused to the extracellular antigen binding domain. The transmembrane domain may be derived either from a natural or from a synthetic source. As used herein, a “transmembrane domain” refers to any protein structure that is thermodynamically stable in a cell membrane, e.g., a eukaryotic cell membrane. Transmembrane domains compatible for use in the chimeric cytokine receptors described herein may be obtained from a naturally occurring protein. Alternatively, it can be a synthetic, non-naturally occurring protein segment, e.g., a hydrophobic protein segment that is thermodynamically stable in a cell membrane.

[0144] Transmembrane domains are classified based on the three dimensional structure of the transmembrane domain. For example, transmembrane domains may form an alpha helix, a complex of more than one alpha helix, a beta-barrel, or any other stable structure capable of spanning the phospholipid bilayer of a cell. Furthermore, transmembrane domains may also or alternatively be classified based on the transmembrane domain topology, including the number of passes that the transmembrane domain makes across the membrane and the orientation of the protein. For example, single-pass membrane proteins cross the cell membrane once, and multi-pass membrane proteins cross the cell membrane at least twice (e.g., 2, 3, 4, 5, 6, 7 or more times). Membrane proteins may be defined as Type I, Type II or Type III depending upon the topology of their termini and membrane-passing segment(s) relative to the inside and outside of the cell. Type I membrane proteins have a single membrane-spanning region and are oriented such that the N-terminus of the protein is present on the extracellular side of the lipid bilayer of the cell and the C-terminus of the protein is present on the cytoplasmic side. Type II membrane proteins also have a single membrane-spanning region but are oriented such that the C-terminus of the protein is present on the extracellular side of the lipid bilayer of the cell and the N-terminus of the protein is present on the cytoplasmic side. Type III membrane proteins have multiple membrane-spanning segments and may be further sub-classified based on the number of transmembrane segments and the location of N- and C-termini.

[0145] In some embodiments, the transmembrane domain of the chimeric cytokine receptor described herein is derived from a Type I single-pass membrane protein. In some embodiments, transmembrane domains from multi-pass membrane proteins may also be compatible for use in the chimeric cytokine receptors described herein. Multi-pass membrane proteins may comprise a complex (at least 2, 3, 4, 5, 6, 7 or more) alpha helices or a beta sheet structure. In some embodiments, the N-terminus and the C-terminus of a multi-pass membrane protein are present on opposing sides of the lipid bilayer, e.g., the N-terminus of the protein is present on the cytoplasmic side of the lipid bilayer and the C-terminus of the protein is present on the extracellular side.

[0146] Transmembrane domains for use in the chimeric cytokine receptors described herein can also comprise at least a portion of a synthetic, non-naturally occurring protein segment. In some embodiments, the transmembrane domain is a synthetic, non-naturally occurring alpha helix or beta sheet. In some embodiments, the protein segment is at least approximately 20 amino acids, e.g., at least 18, 19, 20, 21, 22, 23, 24, 25, 26, 27, 28, 29, 30, or more amino acids. Examples of synthetic transmembrane domains are known in the art, for example in U.S. Pat. No. 7,052,906 and PCT Publication No. WO 2000/032776, the relevant disclosures of which are incorporated by reference herein.

[0147] The transmembrane domain provided herein may comprise a transmembrane region and a cytoplasmic region located at the C-terminal side of the transmembrane domain. The cytoplasmic region of the transmembrane domain may comprise three or more amino acids and, in some embodiments, helps to orient the transmembrane domain in the lipid bilayer. In some embodiments, one or more cysteine residues are present in the transmembrane region of the transmembrane domain. In some embodiments, one or more cysteine residues are present in the cytoplasmic region of the transmembrane domain. In some embodiments, the cytoplasmic region of the transmembrane domain comprises positively charged amino acids. In some embodiments, the cytoplasmic region of the transmembrane domain comprises the amino acids arginine, serine, and lysine.

[0148] In some embodiments, the transmembrane region of the transmembrane domain comprises hydrophobic amino acid residues. In some embodiments, the transmembrane domain of the chimeric cytokine receptor provided herein comprises an artificial hydrophobic sequence. For example, a triplet of phenylalanine, tryptophan and valine may be present at the C terminus of the transmembrane domain. In some embodiments, the transmembrane region comprises mostly hydrophobic amino acid residues, such as alanine, leucine, isoleucine, methionine, phenylalanine, tryptophan, or valine. In some embodiments, the transmembrane region is hydrophobic. In some embodiments, the transmembrane region comprises a poly-leucine-alanine sequence. The hydropathy, or hydrophobic or hydrophilic characteristics of a protein or protein segment, can be assessed by any method known in the art, for example the Kyte and Doolittle hydropathy analysis.

[0149] In some embodiments, the transmembrane domain of the chimeric cytokine receptor comprises a transmembrane domain chosen from the transmembrane domain of an alpha, beta or zeta chain of a T-cell receptor, CD28, CD3 epsilon, CD45, CD4, CD5, CD8, CD9, CD16, CD22, CD33, CD3γ, CD64, CD80, CD86, CD134, CD137, CD154, KIRDS2, OX40, CD2, CD27, LFA-1 (CD11a, CD18), ICOS (CD278), 4-1BB (CD137), GITR, CD40, BAFFR, HVEM (LIGHTR), SLAMF7, NKp80 (KLRF1), CD160, CD19, IL-2R beta, IL-2R gamma, IL-7R a, ITGA1, VLA1, CD49a, ITGA4, IA4, CD49D, ITGA6, VLA-6, CD49f, ITGAD, CD11d, ITGAE, CD103, ITGAL, CD11a, LFA-1, ITGAM, CD11b, ITGAX, CD11c, ITGB1, CD29, ITGB2, CD18, LFA-1, ITGB7, TNFR2, DNAM1 (CD226), SLAMF4 (CD244, 2B4), CD84, CD96 (Tactile), CEACAM1, CRT AM, Ly9 (CD229), CD160 (BY55), PSGL1, CDIOO (SEMA4D), SLAMF6 (NTB-A, Ly108), SLAM (SLAMF1, CD150, IPO-3), BLAME (SLAMF8), SELPLG (CD162), LTBR, PAG/Cbp, NKp44, NKp30, NKp46, NKG2D, and/or NKG2C.

[0150] In some embodiments, the transmembrane domain of the present chimeric cytokine receptor comprises a Janus Kinase (JAK)-binding domain. In some embodiments, the JAK-binding domain is derived from a group consisting of EPOR, GHR, TPOR, or a variant thereof. In some embodiments, the JAK-binding domain is derived from TPOR. In some embodiments, the JAK-binding domain comprises the amino acid sequence of SEQ ID NO: 7. In some embodiments, the JAK-binding domain is derived from EPOR. In some embodiments, the JAK-binding domain is derived from GHR. In some embodiments, the transmembrane domain of the present chimeric cytokine receptor comprises a JAK-binding domain in addition to a transmembrane domain described above.

### Extracellular Domain

[0151] In some embodiments, the extracellular domain of the present chimeric cytokine receptor binds to an antigen expressed on the surface of a target cell, such as a tumor cell or an infected cell.

[0152] The extracellular domain of the chimeric cytokine receptors described herein comprises one or more antigen binding domains. The extracellular domain of the chimeric cytokine receptors provided herein can be in any format as long as the binding of the extracellular domain to its target activates downstream intracellular cytokine signals, e.g., triggering the dimerization of the chimeric cytokine receptors. In some embodiments, the extracellular domain is derived from a naturally occurring receptor (e.g., an ECD of a receptor). In other embodiments, the extracellular domain is not derived from a naturally occurring receptor. In some embodiments, the first extracellular antigen binding domain is derived from NKG2D or truncated NKG2D (such as the ECD of NKG2D or truncated NKG2D), or a variant thereof. In some embodiments, the first extracellular antigen binding domain comprises the amino acid sequence of SEQ ID NOs: 6, 156 or 157, or an amino acid sequence having at least 75%, 80%, 85%, 90%, 91%, 92%, 93%, 94%, 95%, 96%, 97%, 98%, or 99% identity to SEQ ID NOs: 6, 156 or 157. In some embodiments, the first extracellular antigen binding domain is derived from truncated NKG2D (amino acid positions 89-216, SEQ ID NO: 157). In some embodiments, the first extracellular antigen binding domain is derived from truncated NKG2D (amino acid positions 98-216, SEQ ID NO: 156). In some embodiments, the first extracellular antigen binding domain comprises the amino acid sequence of SEQ ID NO: 6. In some embodiments, the first extracellular antigen binding domain is derived from TIGIT (such as the ECD of TIGIT). In some embodiments, the first extracellular antigen binding domain comprises the amino acid sequence of SEQ ID NO: 145. In some embodiments, the first extracellular antigen binding domain is derived from SIRP-α (such as the ECD of SIRP-a). In some embodiments, the first extracellular antigen binding domain comprises the amino acid sequence of SEQ ID NO: 147. In some embodiments, the first extracellular antigen binding domain is derived from an antibody or antigen binding fragment thereof targeting NKG2D ligand or a variant thereof. In some embodiments, the NKG2D ligand is selected from a group consisting of MICA/B, ULBP-1, ULBP-2,5,6 and ULBP-3. In some embodiments, the antibody or antigen binding fragment thereof comprises one or more scFv(s) or one or more sdAb(s) that bind to the NKG2D ligand. In some embodiments, the extracellular antigen binding domain is derived from an extracellular domain of an immune checkpoint. In some embodiments, the immune checkpoint is selected from a group consisting of PD-1, CTLA4, or a variant thereof. In some embodiments, the immune checkpoint is PD-1. In some embodiments, the immune checkpoint is CTLA4.

[0153] In some embodiments, the extracellular antigen binding domain of the chimeric cytokine receptor provided herein is monospecific. In other embodiments, the extracellular antigen binding domain of the chimeric cytokine receptor provided herein is multispecific. In other embodiments, the extracellular antigen binding domain of the chimeric cytokine receptor provided herein is monovalent. In other embodiments, the extracellular antigen binding domain of the chimeric cytokine receptor provided herein is multivalent. In some embodiments, the extracellular antigen binding domain comprises two or more antigen binding domains which are fused to each other directly via peptide bonds, or via peptide linkers.

[0154] In some embodiments, the extracellular antigen binding domain comprises an antibody or a fragment thereof. For example, the binding domain may be derived from monoclonal antibodies (including agonist, antagonist, neutralizing antibodies, full length or intact monoclonal antibodies), antibody with polyepitopic or monoepitopic specificity, polyclonal or monovalent antibodies, multivalent antibodies, multispecific antibodies (e.g., bispecific antibodies so long as they exhibit the desired biological activity), formed from at least two intact antibodies, single chain antibodies, single domain antibodies and fragments thereof (e.g., domain antibodies). An antibody can be human, humanized, chimeric and/or affinity matured, as well as an antibody from other species, for example, mouse, rabbit, llama, etc. In some embodiments, the antibody include a polypeptide product of B cells within the immunoglobulin class of polypeptides that is able to bind to a specific molecular antigen and is composed of two identical pairs of polypeptide chains, wherein each pair has one heavy chain (about 50-70 kDa) and one light chain (about 25 kDa), each amino-terminal portion of each chain includes a variable region of about 100 to about 130 or more amino acids, and each carboxy-terminal portion of each chain includes a constant region. See, e.g., Antibody Engineering (Borrebaeck ed., 2d ed. 1995); and Kuby, Immunology (3d ed. 1997). Antibodies also include, but are not limited to, synthetic antibodies, recombinantly produced antibodies, single domain antibodies including from Camelidae species (e.g., llama or alpaca) or their humanized variants, intrabodies, anti-idiotypic (anti-Id) antibodies, and functional fragments (e.g., antigen-binding fragments) of any of the above, which refers to a portion of an antibody heavy or light chain polypeptide that retains some or all of the binding activity of the antibody from which the fragment was derived. Non-limiting examples of functional fragments (e.g., antigen-binding fragments) include single-chain Fvs (scFv) (e.g., including monospecific, bispecific, etc.), Fab fragments, F(ab′) fragments, F(ab)₂ fragments, F(ab′)₂ fragments, disulfide-linked Fvs (dsFv), Fd fragments, Fv fragments, diabody, triabody, tetrabody, and minibody. In particular, antibodies provided herein include immunoglobulin molecules and immunologically active portions of immunoglobulin molecules, for example, antigen-binding domains or molecules that contain an antigen-binding site that binds to an antigen (e.g., one or more CDRs of an antibody). Such antibody fragments can be found in, for example, Harlow and Lane, Antibodies: A Laboratory Manual (1989); Mol. Biology and Biotechnology: A Comprehensive Desk Reference (Myers ed., 1995); Huston et al., 1993, Cell Biophysics 22:189-224; Pluckthun and Skerra, 1989, Meth. Enzymol. 178:497-515; and Day, Advanced Immunochemistry (2d ed. 1990). The antibodies provided herein can be of any class (e.g., IgG, IgE, IgM, IgD, and IgA) or any subclass (e.g., IgG1, IgG2, IgG3, IgG4, IgA1, and IgA2) of immunoglobulin molecule. Antibodies may be agonistic antibodies or antagonistic antibodies. Antibodies may be neither agonistic nor antagonistic.

[0155] In a specific embodiment, the extracellular antigen binding domain of the present chimeric cytokine receptors comprise a single-chain Fv (sFv or scFv). ScFvs are antibody fragments that comprise the VH and VL antibody domains connected into a single polypeptide chain. Preferably, the scFv polypeptide further comprises a polypeptide linker between the VH and VL domains which enables the scFv to form the desired structure for antigen binding. See Pluckthun in The Pharmacology of Monoclonal Antibodies, vol. 113, Rosenburg and Moore eds., Springer-Verlag, New York, pp. 269-315 (1994).

[0156] In another specific embodiment, the extracellular antigen binding domain of the present chimeric cytokine receptors comprises one or more single domain antibodies (sdAbs). The sdAbs may be of the same or different origins, and of the same or different sizes. Exemplary sdAbs include, but are not limited to, heavy chain variable domains from heavy-chain only antibodies (e.g., V_{H}H or VNAR), binding molecules naturally devoid of light chains, single domains (such as VH or VL) derived from conventional 4-chain antibodies, humanized heavy-chain only antibodies, human single domain antibodies produced by transgenic mice or rats expressing human heavy chain segments, and engineered domains and single domain scaffolds other than those derived from antibodies. Any sdAbs known in the art or developed by the present disclosure, including the single domain antibodies described above in the present disclosure, may be used to construct the chimeric cytokine receptors described herein. The sdAbs may be derived from any species including, but not limited to mouse, rat, human, camel, llama, lamprey, fish, shark, goat, rabbit, and bovine. Single domain antibodies contemplated herein also include naturally occurring single domain antibody molecules from species other than Camelidae and sharks.

[0157] In some embodiments, the sdAb is derived from a naturally occurring single domain antigen binding molecule known as heavy chain antibody devoid of light chains (also referred herein as “heavy chain only antibodies”). Such single domain molecules are disclosed in WO 94/04678 and Hamers-Casterman, C. et al., Nature 363:446-448 (1993), for example. For clarity reasons, the variable domain derived from a heavy chain molecule naturally devoid of light chain is known herein as a V_{H}H to distinguish it from the conventional VH of four chain immunoglobulins. Such a V_{H}H molecule can be derived from antibodies raised in Camelidae species, for example, camel, llama, vicuna, fromedary, alpaca and guanaco. Other species besides Camelidae may produce heavy chain molecules naturally devoid of light chain, and such V_{H}Hs are within the scope of the present disclosure. In addition, humanized versions of V_{H}Hs as well as other modifications and variants are also contemplated and within the scope of the present disclosure. In some embodiments, the sdAb is derived from a variable region of the immunoglobulin found in cartilaginous fish. For example, the sdAb can be derived from the immunoglobulin isotype known as Novel Antigen Receptor (NAR) found in the serum of shark. Methods of producing single domain molecules derived from a variable region of NAR (“IgNARs”) are described in WO 03/014161 and Streltsov, Protein Sci. 14:2901-2909 (2005).

[0158] In some embodiments, naturally occurring V_{H}H domains against a particular antigen or target, can be obtained from (naïve or immune) libraries of Camelid V_{H}H sequences. Such methods may or may not involve screening such a library using said antigen or target, or at least one part, fragment, antigenic determinant or epitope thereof using one or more screening techniques known in the field. Such libraries and techniques are for example described in WO 99/37681, WO 01/90190, WO 03/025020 and WO 03/035694. Alternatively, improved synthetic or semi-synthetic libraries derived from (naïve or immune) V_{H}H libraries may be used, such as V_{H}H libraries obtained from (naïve or immune) V_{H}H libraries by techniques such as random mutagenesis and/or CDR shuffling, as for example described in WO 00/43507.

[0159] In some embodiments, the sdAb is recombinant, CDR-grafted, humanized, camelized, de-immunized and/or in vitro generated (e.g., selected by phage display). In some embodiments, the amino acid sequence of the framework regions may be altered by “camelization” of specific amino acid residues in the framework regions. Camelization refers to the replacing or substitution of one or more amino acid residues in the amino acid sequence of a (naturally occurring) VH domain from a conventional 4-chain antibody by one or more of the amino acid residues that occur at the corresponding position(s) in a V_{H}H domain of a heavy chain antibody. This can be performed in a manner known in the field, which will be clear to the skilled person. Such “camelizing” substitutions are preferably inserted at amino acid positions that form and/or are present at the VH-VL interface, and/or at the so-called Camelidae hallmark residues, as defined herein (see for example WO 94/04678, Davies and Riechmann FEBS Letters 339: 285-290 (1994); Davies and Riechmann, Protein Engineering 9 (6): 531-537 (1996); Riechmann, J. Mol. Biol. 259: 957-969 (1996); and Riechmann and Muyldermans, J. Immunol. Meth. 231: 25-38 (1999)).

[0160] In some embodiments, the sdAb is a human single domain antibody produced by transgenic mice or rats expressing human heavy chain segments. See, e.g., US20090307787, U.S. Pat. No. 8,754,287, US20150289489, US20100122358, and WO2004049794.

[0161] In some embodiments, the single domain antibodies are generated from conventional four-chain antibodies. See, for example, EP 0 368 684; Ward et al., Nature, 341 (6242): 544-6 (1989); Holt et al., Trends Biotechnol., 21(11):484-490 (2003); WO 06/030220; and WO 06/003388.

[0162] In some embodiments, the extracellular antigen binding domain comprises humanized antibodies or fragment thereof. A humanized antibody can comprise human framework region and human constant region sequences.

[0163] Humanized antibodies can be produced using a variety of techniques known in the art, including but not limited to, CDR-grafting (European Patent No. EP 239,400; International publication No. WO 91/09967; and U.S. Pat. Nos. 5,225,539, 5,530,101, and 5,585,089), veneering or resurfacing (European Patent Nos. EP 592,106 and EP 519,596; Padlan, 1991, Molecular Immunology 28(4/5):489-498; Studnicka et al., 1994, Protein Engineering 7(6):805-814; and Roguska et al., 1994, PNAS 91:969-973), chain shuffling (U.S. Pat. No. 5,565,332), and techniques disclosed in, e.g., U.S. Pat. Nos. 6,407,213, 5,766,886, WO 93/17105, Tan et al., J. Immunol. 169:1119 25 (2002), Caldas et al., Protein Eng. 13(5):353-60 (2000), Morea et al., Methods 20(3):267 79 (2000), Baca et al., J. Biol. Chem. 272(16):10678-84 (1997), Roguska et al., Protein Eng. 9(10):895 904 (1996), Couto et al., Cancer Res. 55 (23 Supp):5973s-5977s (1995), Couto et al., Cancer Res. 55(8):1717-22 (1995), Sandhu J S, Gene 150(2):409-10 (1994), and Pedersen et al., J. Mol. Biol. 235(3):959-73 (1994). See also U.S. Patent Pub. No. US 2005/0042664 A1 (Feb. 24, 2005), each of which is incorporated by reference herein in its entirety. Various methods for humanizing non-human antibodies are known in the art. For example, a humanized antibody can have one or more amino acid residues introduced into it from a source that is non-human. These non-human amino acid residues are often referred to as “import” residues, which are typically taken from an “import” variable domain. Humanization may be performed, for example, following the method of Jones et al., 1986, Nature 321:522-25; Riechmann et al., 1988, Nature 332:323-27; and Verhoeyen et al., 1988, Science 239:1534-36), by substituting hypervariable region sequences for the corresponding sequences of a human antibody.

[0164] In some cases, the humanized antibodies are constructed by CDR grafting, in which the amino acid sequences of the six CDRs of the parent non-human antibody (e.g., rodent) are grafted onto a human antibody framework. For example, Padlan et al. determined that only about one third of the residues in the CDRs actually contact the antigen, and termed these the “specificity determining residues,” or SDRs (Padlan et al., 1995, FASEB J. 9:133-39). In the technique of SDR grafting, only the SDR residues are grafted onto the human antibody framework (see, e.g., Kashmiri et al., 2005, Methods 36:25-34).

[0165] The choice of human variable domains, both light and heavy, to be used in making the humanized antibodies can be important to reduce antigenicity. For example, according to the so-called “best-fit” method, the sequence of the variable domain of a non-human (e.g., rodent) antibody is screened against the entire library of known human variable-domain sequences. The human sequence that is closest to that of the rodent may be selected as the human framework for the humanized antibody (Sims et al., 1993, J. Immunol. 151:2296-308; and Chothia et al., 1987, J. Mol. Biol. 196:901-17). Another method uses a particular framework derived from the consensus sequence of all human antibodies of a particular subgroup of light or heavy chains. The same framework may be used for several different humanized antibodies (Carter et al., 1992, Proc. Natl. Acad. Sci. USA 89:4285-89; and Presta et al., 1993, J. Immunol. 151:2623-32). In some cases, the framework is derived from the consensus sequences of the most abundant human subclasses, VL6 subgroup I (VL6I) and VH subgroup III (VHIII). In another method, human germline genes are used as the source of the framework regions.

[0166] In an alternative paradigm based on comparison of CDRs, called superhumanization, FR homology is irrelevant. The method consists of comparison of the non-human sequence with the functional human germline gene repertoire. Those genes encoding the same or closely related canonical structures to the murine sequences are then selected. Next, within the genes sharing the canonical structures with the non-human antibody, those with highest homology within the CDRs are chosen as FR donors. Finally, the non-human CDRs are grafted onto these FRs (see, e.g., Tan et al., 2002, J. Immunol. 169:1119-25).

[0167] It is further generally desirable that antibodies be humanized with retention of their affinity for the antigen and other favorable biological properties. To achieve this goal, according to one method, humanized antibodies are prepared by a process of analysis of the parental sequences and various conceptual humanized products using three-dimensional models of the parental and humanized sequences. Three-dimensional immunoglobulin models are commonly available and are familiar to those skilled in the art. Computer programs are available which illustrate and display probable three-dimensional conformational structures of selected candidate immunoglobulin sequences. These include, for example, WAM (Whitelegg and Rees, 2000, Protein Eng. 13:819-24), Modeller (Sali and Blundell, 1993, J. Mol. Biol. 234:779-815), and Swiss PDB Viewer (Guex and Peitsch, 1997, Electrophoresis 18:2714-23). Inspection of these displays permits analysis of the likely role of the residues in the functioning of the candidate immunoglobulin sequence, e.g., the analysis of residues that influence the ability of the candidate immunoglobulin to bind its antigen. In this way, FR residues can be selected and combined from the recipient and import sequences so that the desired antibody characteristic, such as increased affinity for the target antigen(s), is achieved. In general, the hypervariable region residues are directly and most substantially involved in influencing antigen binding.

[0168] Another method for antibody humanization is based on a metric of antibody humanness termed Human String Content (HSC). This method compares the mouse sequence with the repertoire of human germline genes, and the differences are scored as HSC. The target sequence is then humanized by maximizing its HSC rather than using a global identity measure to generate multiple diverse humanized variants (Lazar et al., 2007, Mol. Immunol. 44:1986-98).

[0169] In addition to the methods described above, empirical methods may be used to generate and select humanized antibodies. These methods include those that are based upon the generation of large libraries of humanized variants and selection of the best clones using enrichment technologies or high throughput screening techniques. Antibody variants may be isolated from phage, ribosome, and yeast display libraries as well as by bacterial colony screening (see, e.g., Hoogenboom, 2005, Nat. Biotechnol. 23:1105-16; Dufner et al., 2006, Trends Biotechnol. 24:523-29; Feldhaus et al., 2003, Nat. Biotechnol. 21:163-70; and Schlapschy et al., 2004, Protein Eng. Des. Sel. 17:847-60).

[0170] In the FR library approach, a collection of residue variants are introduced at specific positions in the FR followed by screening of the library to select the FR that best supports the grafted CDR. The residues to be substituted may include some or all of the “Vernier” residues identified as potentially contributing to CDR structure (see, e.g., Foote and Winter, 1992, J. Mol. Biol. 224:487-99), or from the more limited set of target residues identified by Baca et al. (1997, J. Biol. Chem. 272:10678-84).

[0171] In FR shuffling, whole FRs are combined with the non-human CDRs instead of creating combinatorial libraries of selected residue variants (see, e.g., Dall'Acqua et al., 2005, Methods 36:43-60). The libraries may be screened for binding in a two-step process, first humanizing VL, followed by VH. Alternatively, a one-step FR shuffling process may be used. Such a process has been shown to be more efficient than the two-step screening, as the resulting antibodies exhibited improved biochemical and physicochemical properties including enhanced expression, increased affinity, and thermal stability (see, e.g., Damschroder et al., 2007, Mol. Immunol. 44:3049-60).

[0172] The “humaneering” method is based on experimental identification of essential minimum specificity determinants (MSDs) and is based on sequential replacement of non-human fragments into libraries of human FRs and assessment of binding. It begins with regions of the CDR3 of non-human VH and VL chains and progressively replaces other regions of the non-human antibody into the human FRs, including the CDR1 and CDR2 of both VH and VL. This methodology typically results in epitope retention and identification of antibodies from multiple subclasses with distinct human V-segment CDRs. Humaneering allows for isolation of antibodies that are 91-96% homologous to human germline gene antibodies (see, e.g., Alfenito, Cambridge Healthtech Institute's Third Annual PEGS, The Protein Engineering Summit, 2007).

[0173] The “human engineering” method involves altering a non-human antibody or antibody fragment, such as a mouse or chimeric antibody or antibody fragment, by making specific changes to the amino acid sequence of the antibody so as to produce a modified antibody with reduced immunogenicity in a human that nonetheless retains the desirable binding properties of the original non-human antibodies. Generally, the technique involves classifying amino acid residues of a non-human (e.g., mouse) antibody as “low risk,” “moderate risk,” or “high risk” residues. The classification is performed using a global risk/reward calculation that evaluates the predicted benefits of making particular substitution (e.g., for immunogenicity in humans) against the risk that the substitution will affect the resulting antibody's folding. The particular human amino acid residue to be substituted at a given position (e.g., low or moderate risk) of a non-human (e.g., mouse) antibody sequence can be selected by aligning an amino acid sequence from the non-human antibody's variable regions with the corresponding region of a specific or consensus human antibody sequence. The amino acid residues at low or moderate risk positions in the non-human sequence can be substituted for the corresponding residues in the human antibody sequence according to the alignment. Techniques for making human engineered proteins are described in greater detail in Studnicka et al., 1994, Protein Engineering 7:805-14; U.S. Pat. Nos. 5,766,886; 5,770,196; 5,821,123; and 5,869,619; and PCT Publication WO 93/11794.

[0174] A composite human antibody can be generated using, for example, Composite Human Antibody™ technology (Antitope Ltd., Cambridge, United Kingdom). To generate composite human antibodies, variable region sequences are designed from fragments of multiple human antibody variable region sequences in a manner that avoids T cell epitopes, thereby minimizing the immunogenicity of the resulting antibody. Such antibodies can comprise human constant region sequences, e.g., human light chain and/or heavy chain constant regions.

[0175] A deimmunized antibody is an antibody in which T-cell epitopes have been removed. Methods for making deimmunized antibodies have been described. See, e.g., Jones et al., Methods Mol Biol. 2009; 525:405-23, xiv, and De Groot et al., Cell. Immunol. 244:148-153(2006)). Deimmunized antibodies comprise T-cell epitope-depleted variable regions and human constant regions. Briefly, VH and VL of an antibody are cloned and T-cell epitopes are subsequently identified by testing overlapping peptides derived from the VH and VL of the antibody in a T cell proliferation assay. T cell epitopes are identified via in silico methods to identify peptide binding to human MHC class II. Mutations are introduced in the VH and VL to abrogate binding to human MHC class II. Mutated VH and VL are then utilized to generate the deimmunized antibody.

[0176] In certain embodiments, the extracellular antigen binding domain comprises multiple binding domains. In some embodiments, the extracellular antigen binding domain comprises multispecific antibodies or fragments thereof, e.g., an extracellular antigen binding domain comprising multiple binding domains (e.g., multiple scFvs) in tandem. In other embodiments, the extracellular antigen binding domain comprises multivalent antibodies or fragments thereof. The term “specificity” refers to selective recognition of an antigen binding protein for a particular epitope of an antigen. The term “multispecific” as used herein denotes that an antigen binding protein has two or more antigen-binding sites of which at least two bind different antigens. The term “valent” as used herein denotes the presence of a specified number of binding sites in an antigen binding protein. A full length antibody has two binding sites and is bivalent. As such, the terms “trivalent”, “tetravalent”, “pentavalent” and “hexavalent” denote the presence of two binding site, three binding sites, four binding sites, five binding sites, and six binding sites, respectively, in an antigen binding protein.

[0177] Multispecific antibodies such as bispecific antibodies are antibodies that have binding specificities for at least two different antigens. Methods for making multipecific antibodies are known in the art, such as, by co-expression of two immunoglobulin heavy chain-light chain pairs, where the two heavy chains have different specificities (see, e.g., Milstein and Cuello, 1983, Nature 305:537-40). For further details of generating multispecific antibodies (e.g., bispecific antibodies), see, for example, Bispecific Antibodies (Kontermann ed., 2011).

[0178] The antibodies can be multivalent antibodies with two or more antigen binding sites (e.g., tetravalent antibodies), which can be readily produced by recombinant expression of nucleic acid encoding the polypeptide chains of the antibody. In certain embodiments, a multivalent antibody comprises (or consists of) three to about eight antigen binding sites. In one such embodiment, a multivalent antibody comprises (or consists of) four antigen binding sites. The multivalent antibody comprises at least one polypeptide chain (e.g., two polypeptide chains), wherein the polypeptide chain(s) comprise two or more variable domains. For instance, the polypeptide chain(s) may comprise VD1-(X1)n-VD2-(X2)n-Fc, wherein VD1 is a first variable domain, VD2 is a second variable domain, Fc is one polypeptide chain of an Fc region, X1 and X2 represent an amino acid or polypeptide, and n is 0 or 1. For instance, the polypeptide chain(s) may comprise: VH-CH1-flexible linker-VH-CH1-Fc region chain; or VH-CH1-VH-CH1-Fc region chain. The multivalent antibody herein may further comprise at least two (e.g., four) light chain variable domain polypeptides. The multivalent antibody herein may, for instance, comprise from about two to about eight light chain variable domain polypeptides. The light chain variable domain polypeptides contemplated here comprise a light chain variable domain and, optionally, further comprise a CL domain.

[0179] In case there are multiple binding domains in the extracellular antigen binding domain of the present chimeric cytokine receptors. The various domains may be fused to each other via peptide linkers. In some embodiments, the domains are directly fused to each other without any peptide linkers. The peptide linkers may be the same or different. Each peptide linker may have the same or different length and/or sequence depending on the structural and/or functional features of the various domains. Each peptide linker may be selected and optimized independently. The length, the degree of flexibility and/or other properties of the peptide linker(s) used in the chimeric cytokine receptors may have some influence on properties, including but not limited to the affinity, specificity or avidity for one or more particular antigens or epitopes. In some embodiment, a peptide linker comprises flexible residues (such as glycine and serine) so that the adjacent domains are free to move relative to each other. For example, a glycine-serine doublet can be a suitable peptide linker.

[0180] The peptide linker may have a naturally occurring sequence, or a non-naturally occurring sequence. For example, a sequence derived from the hinge region of heavy chain only antibodies may be used as the linker. See, for example, WO1996/34103. In some embodiments, the peptide linker is a flexible linker. Exemplary flexible linkers include but not limited to glycine polymers (G)n, glycine-serine polymers (including, for example, (GS)n (SEQ ID NO: 152), (GSGGS)n (SEQ ID NO: 153), (GGGS)n (SEQ ID NO: 154), and (GGGGS)n (SEQ ID NO: 155), where n is an integer of at least one), glycine-alanine polymers, alanine-serine polymers, and other flexible linkers known in the art. Other linkers known in the art, for example, as described in WO2016014789, WO2015158671, WO2016102965, US20150299317, WO2018067992, U.S. Pat. No. 7,741,465, Colcher et al., J. Nat. Cancer Inst. 82:1191-1197 (1990), and Bird et al., Science 242:423-426 (1988) may also be included in the chimeric cytokine receptors provided herein, the disclosure of each of which is incorporated herein by reference.

[0181] In some embodiments, the extracellular antigen binding domain provided in the present chimeric cytokine receptors recognizes an antigen that acts as a cell surface marker on target cells associated with a special disease state. In some embodiments, the antigen is a tumor antigen. Tumors express a number of proteins that can serve as a target antigen for an immune response, particularly T cell mediated immune responses. The antigens targeted by the chimeric cytokine receptor may be antigens on a single diseased cell or antigens that are expressed on different cells that each contribute to the disease. The antigens targeted by the chimeric cytokine receptor may be directly or indirectly involved in the diseases.

[0182] In some embodiments, the antigen of a target cell is an antigen on the surface of the cancer cell. In some embodiments, the antigen is a tumor-specific antigen, a tumor-associated antigen, or a neoantigen.

[0183] In some embodiments, the target cell is a cancer cell, e.g., a cell of an adrenal cancer, anal cancer, appendix cancer, bile duct cancer, bladder cancer, bone cancer, brain cancer, breast cancer, cervical cancer, colorectal cancer, esophageal cancer, gallbladder cancer, gestational trophoblastic, head and neck cancer, Hodgkin lymphoma, intestinal cancer, kidney cancer, leukemia, liver cancer, lung cancer, melanoma, mesothelioma, multiple myeloma (MN), neuroendocrine tumor, non-Hodgkin lymphoma, oral cancer, ovarian cancer, pancreatic cancer, prostate cancer, sinus cancer, skin cancer, soft tissue sarcoma spinal cancer, stomach cancer, testicular cancer, throat cancer, thyroid cancer, uterine cancer, endometrial cancer, vaginal cancer, or vulvar cancer. In some embodiments, the cancer is an adrenal cancer, anal cancer, appendix cancer, bile duct cancer, bladder cancer, bone cancer, brain cancer, breast cancer, cervical cancer, colorectal cancer, esophageal cancer, gallbladder cancer, gestational trophoblastic, head and neck cancer, Hodgkin lymphoma, intestinal cancer, kidney cancer, leukemia, liver cancer, lung cancer, melanoma, mesothelioma, multiple myeloma (MM), neuroendocrine tumor, non-Hodgkin lymphoma, oral cancer, ovarian cancer, pancreatic cancer, prostate cancer, sinus cancer, skin cancer, soft tissue sarcoma spinal cancer, stomach cancer, testicular cancer, throat cancer, thyroid cancer, uterine cancer, endometrial cancer, vaginal cancer, or vulvar cancer.

[0184] In some embodiments, the adrenal cancer is an adrenocortical carcinoma (ACC), adrenal cortex cancer, pheochromocytoma, or neuroblastoma. In some embodiments, the anal cancer is a squamous cell carcinoma, cloacogenic carcinoma, adenocarcinoma, basal cell carcinoma, or melanoma. In some embodiments, the appendix cancer is a neuroendocrine tumor (NET), mucinous adenocarcinoma, goblet cell carcinoid, intestinal-type adenocarcinoma, or signet-ring cell adenocarcinoma. In some embodiments, the bile duct cancer is an extrahepatic bile duct cancer, adenocarcinomas, hilar bile duct cancer, perihilar bile duct cancer, distal bile duct cancer, or intrahepatic bile duct cancer. In some embodiments, the bladder cancer is transitional cell carcinoma (TCC), papillary carcinoma, flat carcinoma, squamous cell carcinoma, adenocarcinoma, small-cell carcinoma, or sarcoma. In some embodiments, the bone cancer is a primary bone cancer, sarcoma, osteosarcoma, chondrosarcoma, sarcoma, fibrosarcoma, malignant fibrous histiocytoma, giant cell tumor of bone, chordoma, or metastatic bone cancer. In some embodiments, the brain cancer is an astrocytoma, brain stem glioma, glioblastoma, meningioma, ependymoma, oligodendroglioma, mixed glioma, pituitary carcinoma, pituitary adenoma, craniopharyngioma, germ cell tumor, pineal region tumor, medulloblastoma, or primary CNS lymphoma. In some embodiments, the breast cancer is a breast adenocarcinoma, invasive breast cancer, noninvasive breast cancer, breast sarcoma, metaplastic carcinoma, adenocystic carcinoma, phyllodes tumor, angiosarcoma, HER2-positive breast cancer, triple-negative breast cancer, or inflammatory breast cancer. In some embodiments, the cervical cancer is a squamous cell carcinoma, or adenocarcinoma. In some embodiments, the colorectal cancer is a colorectal adenocarcinoma, primary colorectal lymphoma, gastrointestinal stromal tumor, leiomyosarcoma, carcinoid tumor, mucinous adenocarcinoma, signet ring cell adenocarcinoma, gastrointestinal carcinoid tumor, or melanoma. In some embodiments, the esophageal cancer is an adenocarcinoma or squamous cell carcinoma. In some embodiments, the gall bladder cancer is an adenocarcinoma, papillary adenocarcinoma, adenosquamous carcinoma, squamous cell carcinoma, small cell carcinoma, or sarcoma. In some embodiments, the gestational trophoblastic disease (GTD) is a hydatidiform mole, gestational trophoblastic neoplasia (GTN), choriocarcinoma, placental-site trophoblastic tumor (PSTT), or epithelioid trophoblastic tumor (ETT). In some embodiments, the head and neck cancer is a laryngeal cancer, nasopharyngeal cancer, hypopharyngeal cancer, nasal cavity cancer, paranasal sinus cancer, salivary gland cancer, oral cancer, oropharyngeal cancer, or tonsil cancer. In some embodiments, the Hodgkin lymphoma is a classical Hodgkin lymphoma, nodular sclerosis, mixed cellularity, lymphocyte-rich, lymphocyte-depleted, or nodular lymphocyte-predominant Hodgkin lymphoma (NLPHL). In some embodiments, the intestinal cancer is a small intestine cancer, small bowel cancer, adenocarcinoma, sarcoma, gastrointestinal stromal tumors, carcinoid tumors, or lymphoma. In some embodiments, the kidney cancer is a renal cell carcinoma (RCC), clear cell RCC, papillary RCC, chromophobe RCC, collecting duct RCC, unclassified RCC, transitional cell carcinoma, urothelial cancer, renal pelvis carcinoma, or renal sarcoma. In some embodiments, the leukemia is an acute lymphocytic leukemia (ALL), acute myeloid leukemia (AML), chronic lymphocytic leukemia (CLL), chronic myeloid leukemia (CML), hairy cell leukemia (HCL), or a myelodysplastic syndrome (MDS). In a specific embodiment, the leukemia is AML. In some embodiments, the liver cancer is a hepatocellular carcinoma (HCC), fibrolamellar HCC, cholangiocarcinoma, angiosarcoma, or liver metastasis. In some embodiments, the lung cancer is a small cell lung cancer, small cell carcinoma, combined small cell carcinoma, non-small cell lung cancer, lung adenocarcinoma, squamous cell lung cancer, large-cell undifferentiated carcinoma, pulmonary nodule, metastatic lung cancer, adenosquamous carcinoma, large cell neuroendocrine carcinoma, salivary gland-type lung carcinoma, lung carcinoid, mesothelioma, sarcomatoid carcinoma of the lung, or malignant granular cell lung tumor. In some embodiments, the melanoma is a superficial spreading melanoma, nodular melanoma, acral-lentiginous melanoma, lentigo maligna melanoma, amelanotic melanoma, desmoplastic melanoma, ocular melanoma, or metastatic melanoma. In some embodiments, the mesothelioma is a pleural mesothelioma, peritoneal mesothelioma, pericardial mesothelioma, or testicular mesothelioma. In some embodiments, the multiple myeloma is an active myeloma or smoldering myeloma. In some embodiments, the neuroendocrine tumor is a gastrointestinal neuroendocrine tumor, pancreatic neuroendocrine tumor, or lung neuroendocrine tumor. In some embodiments, the non-Hodgkin's lymphoma is an anaplastic large-cell lymphoma, lymphoblastic lymphoma, peripheral T cell lymphoma, follicular lymphoma, cutaneous T cell lymphoma, lymphoplasmacytic lymphoma, marginal zone B-cell lymphoma, MALT lymphoma, small-cell lymphocytic lymphoma, Burkitt lymphoma, chronic lymphocytic leukemia (CLL), small lymphocytic lymphoma (SLL), precursor T-lymphoblastic leukemia/lymphoma, acute lymphocytic leukemia (ALL), adult T cell lymphoma/leukemia (ATLL), hairy cell leukemia, B-cell lymphomas, diffuse large B-cell lymphoma (DLBCL), primary mediastinal B-cell lymphoma, primary central nervous system (CNS) lymphoma, mantle cell lymphoma (MCL), marginal zone lymphomas, mucosa-associated lymphoid tissue (MALT) lymphoma, nodal marginal zone B-cell lymphoma, splenic marginal zone B-cell lymphoma, lymphoplasmacytic lymphoma, B-cell non-Hodgkin lymphoma, T cell non-Hodgkin lymphoma, natural killer cell lymphoma, cutaneous T cell lymphoma, Alibert-Bazin synfrome, Sezary synfrome, primary cutaneous anaplastic large-cell lymphoma, peripheral T cell lymphoma, angioimmunoblastic T cell lymphoma (AITL), anaplastic large-cell lymphoma (ALCL), systemic ALCL, enteropathy-type T cell lymphoma (EATL), or hepatosplenic gamma/delta T cell lymphoma. In some embodiments, the oral cancer is a squamous cell carcinoma, verrucous carcinoma, minor salivary gland carcinomas, lymphoma, benign oral cavity tumor, eosinophilic granuloma, fibroma, granular cell tumor, karatoacanthoma, leiomyoma, osteochonfroma, lipoma, schwannoma, neurofibroma, papilloma, condyloma acuminatum, verruciform xanthoma, pyogenic granuloma, rhabdomyoma, odontogenic tumors, leukoplakia, erythroplakia, squamous cell lip cancer, basal cell lip cancer, mouth cancer, gum cancer, or tongue cancer. In some embodiments, the ovarian cancer is a ovarian epithelial cancer, mucinous epithelial ovarian cancer, endometrioid epithelial ovarian cancer, clear cell epithelial ovarian cancer, undifferentiated epithelial ovarian cancer, ovarian low malignant potential tumors, primary peritoneal carcinoma, fallopian tube cancer, germ cell tumors, teratoma, dysgerminoma ovarian germ cell cancer, endodermal sinus tumor, sex cord-stromal tumors, sex cord-gonadal stromal tumor, ovarian stromal tumor, granulosa cell tumor, granulosa-theca tumor, Sertoli-Leydig tumor, ovarian sarcoma, ovarian carcinosarcoma, ovarian adenosarcoma, ovarian leiomyosarcoma, ovarian fibrosarcoma, Krukenberg tumor, or ovarian cyst. In some embodiments, the pancreatic cancer is a pancreatic exocrine gland cancer, pancreatic endocrine gland cancer, or pancreatic adenocarcinoma, islet cell tumor, or neuroendocrine tumor. In some embodiments, the prostate cancer is a prostate adenocarcinoma, prostate sarcoma, transitional cell carcinoma, small cell carcinoma, or neuroendocrine tumor. In some embodiments, the sinus cancer is a squamous cell carcinoma, mucosa cell carcinoma, adenoid cystic cell carcinoma, acinic cell carcinoma, sinonasal undifferentiated carcinoma, nasal cavity cancer, paranasal sinus cancer, maxillary sinus cancer, ethmoid sinus cancer, or nasopharynx cancer. In some embodiments, the skin cancer is a basal cell carcinoma, squamous cell carcinoma, melanoma, Merkel cell carcinoma, Kaposi sarcoma (KS), actinic keratosis, skin lymphoma, or keratoacanthoma. In some embodiments, the soft tissue cancer is an angiosarcoma, dermatofibrosarcoma, epithelioid sarcoma, Ewing's sarcoma, fibrosarcoma, gastrointestinal stromal tumors (GISTs), Kaposi sarcoma, leiomyosarcoma, liposarcoma, dedifferentiated liposarcoma (DL), myxoid/round cell liposarcoma (MRCL), well-differentiated liposarcoma (WDL), malignant fibrous histiocytoma, neurofibrosarcoma, rhabdomyosarcoma (RMS), or synovial sarcoma. In some embodiments, the spinal cancer is a spinal metastatic tumor. In some embodiments, the stomach cancer is a stomach adenocarcinoma, stomach lymphoma, gastrointestinal stromal tumors, carcinoid tumor, gastric carcinoid tumors, Type I ECL-cell carcinoid, Type II ECL-cell carcinoid, or Type III ECL-cell carcinoid. In some embodiments, the testicular cancer is a seminoma, non-seminoma, embryonal carcinoma, yolk sac carcinoma, choriocarcinoma, teratoma, gonadal stromal tumor, leydig cell tumor, or sertoli cell tumor. In some embodiments, the throat cancer is a squamous cell carcinoma, adenocarcinoma, sarcoma, laryngeal cancer, pharyngeal cancer, nasopharynx cancer, oropharynx cancer, hypopharynx cancer, laryngeal cancer, laryngeal squamous cell carcinoma, laryngeal adenocarcinoma, lymphoepithelioma, spindle cell carcinoma, verrucous cancer, undifferentiated carcinoma, or lymph node cancer. In some embodiments, the thyroid cancer is a papillary carcinoma, follicular carcinoma, Hürthle cell carcinoma, medullary thyroid carcinoma, or anaplastic carcinoma. In some embodiments, the uterine cancer is an endometrial cancer, endometrial adenocarcinoma, endometroid carcinoma, serous adenocarcinoma, adenosquamous carcinoma, uterine carcinosarcoma, uterine sarcoma, uterine leiomyosarcoma, endometrial stromal sarcoma, or undifferentiated sarcoma. In some embodiments, the vaginal cancer is a squamous cell carcinoma, adenocarcinoma, melanoma, or sarcoma. In some embodiments, the vulvar cancer is a squamous cell carcinoma or adenocarcinoma.

[0185] Tumor antigens are proteins that are produced by tumor cells that can elicit an immune response, particularly T-cell mediated immune responses. Exemplary tumor antigens include, but not limited to, a glioma-associated antigen, carcinoembryonic antigen (CEA), β-human chorionic gonadotropin, alphafetoprotein (AFP), lectin-reactive AFP, thyroglobulin, RAGE-1, MN-CAIX, human telomerase reverse transcriptase, RU1, RU2 (AS), intestinal carboxyl esterase, mut hsp70-2, M-CSF, prostase, prostate-specific antigen (PSA), PAP, NY-ESO-1, LAGE-la, p53, prostein, PSMA, HER2/neu, survivin and telomerase, prostate-carcinoma tumor antigen-1 (PCTA-1), MAGE, ELF2M, neutrophil elastase, ephrinB2, insulin growth factor (IGF)-I, IGF-II, IGF-I receptor, and mesothelin.

[0186] In some embodiments, the cancer antigen is CEA, immature laminin receptor, TAG-72, HPV E6, HPV E7, BING-4, calcium-activated chloride channel 2, cyclin-B1, 9D7, EpCAM, EphA3, Her2/neu, telomerase, mesothelin, SAP-1, surviving, a BAGE family antigen, CAGE family antigen, GAGE family antigen, MAGE family antigen, SAGE family antigen, XAGE family antigen, NY-ESO-1/LAGE-1, PRAME, SSX-2, Melan-A, MART-1, Gp100, pmel17, tyrosinase, TRP-1, TRP-2, P. polypeptide, MC1R, prostate-specific antigen, β-catenin, BRCA1, BRCA2, CDK4, CML66, fibronectin, MART-2, p53, Ras, TGF-βRII, or MUC1.

[0187] In some embodiments, the tumor antigen comprises one or more antigenic cancer epitopes associated with a malignant tumor. Malignant tumors express a number of proteins that can serve as target antigens for an immune attack. These molecules include, but are not limited to, tissue-specific antigens such as MART-1, tyrosinase and gp100 in melanoma and prostatic acid phosphatase (PAP) and prostate-specific antigen (PSA) in prostate cancer. Other target molecules belong to the group of transformation-related molecules such as the oncogene HER2/Neu/ErbB-2. Yet another group of target antigens are onco-fetal antigens such as carcinoembryonic antigen (CEA).

[0188] In some embodiments, the tumor antigen is a tumor-specific antigen (TSA) or a tumor-associated antigen (TAA). A TSA is unique to tumor cells and does not occur on other cells in the body. A TAA associated antigen is not unique to a tumor cell, and instead is also expressed on a normal cell under conditions that fail to induce a state of immunologic tolerance to the antigen. The expression of the antigen on the tumor may occur under conditions that enable the immune system to respond to the antigen. TAAs may be antigens that are expressed on normal cells during fetal development, when the immune system is immature, and unable to respond or they may be antigens that are normally present at extremely low levels on normal cells, but which are expressed at much higher levels on tumor cells.

[0189] Non-limiting examples of TSA or TAA antigens include: differentiation antigens such as MART-1/MelanA (MART-I), gp 100 (Pmel 17), tyrosinase, TRP-1, TRP-2 and tumor-specific multilineage antigens such as MAGE-1, MAGE-3, BAGE, GAGE-1, GAGE-2, p15; overexpressed embryonic antigens such as CEA; overexpressed oncogenes and mutated tumor-suppressor genes such as p53, Ras, HER2/neu; unique tumor antigens resulting from chromosomal translocations; such as BCR-ABL, E2A-PRL, H4-RET, IGH-IGK, MYL-RAR; and viral antigens, such as the Epstein Barr virus antigens EBVA and the human papillomavirus (HPV) antigens E6 and E7.

[0190] Other large, protein-based antigens include TSP-180, MAGE-4, MAGE-5, MAGE-6, RAGE, NY-ESO, pl85erbB2, pl80erbB-3, c-met, nm-23HI, PSA, TAG-72, CA 19-9, CA 72-4, CAM 17.1, NuMa, K-ras, beta-Catenin, CDK4, Mum-1, p 15, p 16, 43-9F, 5T4, 791Tgp72, alpha-fetoprotein, beta-HCG, BCA225, BTAA, CA 125, CA 15-3\CA 27.29\BCAA, CA 195, CA 242, CA-50, CAM43, CD68\P1, CO-029, FGF-5, G250, Ga733\EpCAM, HTgp-175, M344, MA-50, MG7-Ag, MOV18, NB/70K, NY-CO-1, RCAS 1, SDCCAG16, TA-90\Mac-2 binding protein\cyclophilin C-associated protein, TAAL6, TAG72, TLP, and TPS.

[0191] Additional non-limiting exemplary targets of the a chimeric cytokine receptors provided herein include GPC2, CD276, Delta-like protein ligand 3 (DLL3), NY-ESO-1, melanoma associated antigen 4; survivin protein, synovial sarcoma X breakpoint protein 2, CD3, epidermal growth factor receptor (EGFR), erbb2 tyrosine kinase receptor, HER2, CEA, CD66, CD66e, ROR1, ntrkr1 tyrosine kinase receptor, GPC3, mesothelin, glutamate carboxypeptidase II, PMSA, PD-L1, folate receptor alpha, PSCA, Mucin 1, HLA antigen (such as HLA class I antigen A-2 alpha, HLA class I antigen A-11 alpha, and HLA class II antigen), c-Met, hepatocyte growth factor receptor, K-Ras GTPase (KRAS), IL-15 receptor, Kit tyrosine kinase, PDGF receptor beta, RET tyrosine kinase receptor; Raf 1 protein kinase, Raf B protein kinase, thymidylate synthase, topoisomerase II, Brachyury protein, Flt3 tyrosine kinase, VEGF, VEGF receptor (VEGF-1 receptor, VEGF-2 receptor, and VEGF-3 receptor), estrogen receptor, neoantigen, human papillomavirus E6, and heat shock protein.

[0192] In some specific embodiments, at least one target antigen of the present chimeric cytokine receptors is CD19. In other specific embodiments, at least one target antigen of the present chimeric cytokine receptors is CD20. In yet other specific embodiments, at least one target antigen of the present chimeric cytokine receptors is CD22. In yet other specific embodiments, at least one target antigen of the present chimeric cytokine receptors is BCMA. In yet other specific embodiments, at least one target antigen of the present chimeric cytokine receptors is VEGFR2. In yet other specific embodiments, at least one target antigen of the present chimeric cytokine receptors is FAP. In yet other specific embodiments, at least one target antigen of the present chimeric cytokine receptors is EpCam. In yet other specific embodiments, at least one target antigen of the present chimeric cytokine receptors is GPC3. In yet other specific embodiments, at least one target antigen of the present chimeric cytokine receptors is DLL3. In yet other specific embodiments, at least one target antigen of the present chimeric cytokine receptors is CD133. In yet other specific embodiments, at least one target antigen of the present chimeric cytokine receptors is IL13Rα. In yet other specific embodiments, at least one target antigen of the present chimeric cytokine receptors is EGFRIII. In yet other specific embodiments, at least one target antigen of the present chimeric cytokine receptors is EphA2. In yet other specific embodiments, at least one target antigen of the present chimeric cytokine receptors is Muc1. In yet other specific embodiments, at least one target antigen of the present chimeric cytokine receptors is CD70. In yet other specific embodiments, at least one target antigen of the present chimeric cytokine receptors is CD123. In yet other specific embodiments, at least one target antigen of the present chimeric cytokine receptors is ROR1. In yet other specific embodiments, at least one target antigen of the present chimeric cytokine receptors is PSMA. In yet other specific embodiments, at least one target antigen of the present chimeric cytokine receptors is CD5. In yet other specific embodiments, at least one target antigen of the present chimeric cytokine receptors is GD2. In yet other specific embodiments, at least one target antigen of the present chimeric cytokine receptors is GAP. In yet other specific embodiments, at least one target antigen of the present chimeric cytokine receptors is CD33. In yet other specific embodiments, at least one target antigen of the present chimeric cytokine receptors is CEA. In yet other specific embodiments, at least one target antigen of the present chimeric cytokine receptors is PSCA. In yet other specific embodiments, at least one target antigen of the present chimeric cytokine receptors is Her2. In yet other specific embodiments, at least one target antigen of the present chimeric cytokine receptors is Mesothelin.

[0193] In some embodiments, the chimeric cytokine receptor provided herein binds to a B cell antigen. In some embodiments, the B cell antigen is a CD1a, CD1b, CD1c, CD1d, CD2, CD5, CD6, CD9, CD11a, CD11b, CD11c, CD17, CD18, CD19, CD20, CD21, CD22, CD23, CD24, CD25, CD26, CD27, CD29, CD30, CD31, CD32a, CD32b, CD35, CD37, CD38, CD39, CD40, CD45, CD45RA, CD45RB, CD45RC, CD45RO, CD46, CD47, CD48, CD49b, CD49c, CD49d, CD50, CD52, CD53, CD54, CD55, CD58, CD60a, CD62L, CD63, CD68, CD69, CD70, CD72, CD73, CD74, CD75, CD75S, CD77, CD79a, CD79b, CD80, CD81, CD82, CD83, CD84, CD85E, CD85I, CD85J, CD86, CD92, CD95, CD97, CD98, CD99, CD100, CD102, CD108, CD119, CD120a, CD120b, CD121b, CD122, CD124, CD125, CD126, CD130, CD132, CD137, CD138, CD139, CD147, CD148, CD150, CD152, CD162, CD164, CD166, CD167a, CD170, CD171, CD175, CD175s, CD180, CD184, CD185, CD192, CD196, CD197, CD200, CD205, CD201a, CDw210b, CD212, CD213a1, CD213a2, CD 215, CD217, CD218a, CD218b, CD220, CD221, CD222, CD224, CD225, CD226, CD227, CD229, CD230, CD232, CD252, CD252, CD254, CD255, CD256, CD257 CD258, CD259, CD260, CD261, CD262, CD263, CD264, CD267, CD268, CD269, CD270, CD272, CD274, CD275, CD277, CD279, CD283, CD289, CD290, CD295, CD298, CD300, CD300c, CD305, CD306, CD307a, CD307b, CD307c, CD307d, CD307e, CD314, CD215, CD316, CD317, CD319, CD321, CD327, CD328, CD329, CD338, CD351, CD352, CD353, CD354, CD355, CD356, CD357, CD358, CD360, CD361, CD362, or CD363 antigen.

[0194] In one embodiment, target of the present chimeric cytokine receptor is a pathogen. In certain embodiments, the target cell is a cell comprising a pathogen.

[0195] In some embodiments, the pathogen causes an infectious disease selected from the group consisting of an Acute Flaccid Myelitis (AFM), Anaplasmosis, Anthrax, Babesiosis, Botulism, Brucellosis, Campylobacteriosis, Carbapenem-resistant Infection, Chancroid, Chikungunya Virus Infection, Chlamydia, Ciguatera, Difficile Infection, Perfringens, Coccidioidomycosis fungal infection, coronavirus infection, Covid-19 (SARS-CoV-2), Creutzfeldt-Jacob Disease/transmissible spongiform encephalopathy, Cryptosporidiosis (Crypto), Cyclosporiasis, Dengue 1,2,3 or 4, Diphtheria, E. coli infection/Shiga toxin-producing (STEC), Eastern Equine Encephalitis, Hemorrhagic Fever (Ebola), Ehrlichiosis, Encephalitis, Arboviral or parainfectious, Non-Polio Enterovirus, D68 Enteroviru (EV-D68), Giardiasis, Glanders, Gonococcal Infection, Granuloma inguinale, Haemophilus Influenza disease Type B (Hib or H-flu), Hantavirus Pulmonary Synfrome (HPS), Hemolytic Uremic Synfrome (HUS), Hepatitis A (Hep A), Hepatitis B (Hep B), Hepatitis C (Hep C), Hepatitis D (Hep D), Hepatitis E (Hep E), Herpes, Herpes Zoster (Shingles), Histoplasmosis infection, Human Immunodeficiency Virus/AIDS (HIV/AIDS), Human Papillomavirus (HPV), Influenza (Flu), Legionellosis (Legionnaires Disease), Leprosy (Hansens Disease), Leptospirosis, Listeriosis (Listeria), Lyme Disease, Lymphogranuloma venereum infection (LGV), Malaria, Measles, Melioidosis, Meningitis (Viral), Meningococcal Disease (Meningitis (Bacterial)), Middle East Respiratory Synfrome Coronavirus (MERS-CoV), Mumps, Norovirus, Pediculosis, Pelvic Inflammatory Disease (PID), Pertussis (Whooping Cough), Plague (Bubonic, Septicemic, Pneumonic), Pneumococcal Disease (Pneumonia), Poliomyelitis (Polio), Powassan, Psittacosis, Pthiriasis, Pustular Rash diseases (Small pox, monkeypox, cowpox), Q-Fever, Rabies, Rickettsiosis (Rocky Mountain Spotted Fever), Rubella (German Measles), Salmonellosis gastroenteritis (Salmonella), Scabies, Scombroid, Sepsis, Severe Acute Respiratory Synfrome (SARS), Shigellosis gastroenteritis (Shigella), Smallpox, Staphyloccal Infection Methicillin-resistant (MRSA), Staphylococcal Food Poisoning Enterotoxin B Poisoning (Staph Food Poisoning), Saphylococcal Infection Vancomycin Intermediate (VISA), Staphylococcal Infection Vancomycin Resistant (VRSA), Streptococcal Disease Group A (invasive) (Strep A (invasive), Streptococcal Disease, Group B (Strep-B), Streptococcal Toxic-Shock Synfrome STSS Toxic Shock, Syphilis (primary, secondary, early latent, late latent, congenital), Tetanus Infection, Trichomoniasis, Trichonosis Infection, Tuberculosis (TB), Tuberculosis Latent (LTBI), Tularemia, Typhoid Fever Group D, Vaginosis, Varicella (Chickenpox), Vibrio cholerae (Cholera), Vibriosis (Vibrio), Ebola Virus Hemorrhagic Fever, Lasa Virus Hemorrhagic Fever, Marburg Virus Hemorrhagic Fever, West Nile Virus, Yellow Fever, Yersenia, and Zika Virus Infection. In some embodiments, the infectious disease is Acute Flaccid Myelitis (AFM).

[0196] In some embodiments, the pathogen is a bacteria. In some embodiments, the bacteria is a bacteria of a Bacillus, Bartonella, Bordetella, Borrelia, Brucella, Campylobacter, Chlamydia, Chlamydophila, Clostridium, Corynebacterium, Enterococcus, Escherichia, Francisella, Haemophilus, Helicobacter, Legionella, Leptospira, Listeria, Mycobacterium, Mycoplasma, Neisseria, Pseudomonas, Rickettsia, Salmonella, Shigella, Staphylococcus, Streptococcus, Treponema, Ureaplasma, Vibrio or Yersinia genus.

[0197] In some embodiments, the pathogen is a parasite. In some embodiments, the parasite is a protozoa, helminth, or ectoparasite. In some embodiments, the protozoa is an Entamoeba, Giardia, Leishmania, Balantidium, Plasmodium, or Cryptosporidium. In some embodiments, the helminth is a trematode, cestode, acanthocephalan, or round worm. In some embodiments, the ectoparasite is a arthropod.

[0198] In some embodiments, the pathogen is a virus. In some embodiments, the virus is a virus of the adenoviridae, arenaviridae, astroviridae, bunyaviridae, caliciviridae, coronaviridae, filoviridae, flaviviridae, hepadnaviridae, hepeviridae, orthomyxoviridae, papillomaviridae, paramyxoviridae, parvoviridae, picornaviridae, polyomaviridae, poxviridae, reoviridae, retroviridae, rhabdoviridae, or togaviridae family. In some embodiments, the virus is an adenovirus, coronavirus, coxsackievirus, Epstein-Barr virus, hepatitis A virus, hepatitis B virus, hepatitis C virus, herpes simplex virus type 2, cytomegalovirus, human herpes virus type 8, human immunodeficiency virus, influenza virus, measles virus, mumps virus, human papillomavirus, parainfluenza virus, poliovirus, rabies virus, respiratory syncytial virus, rubella virus, or varicella-zoster virus.

[0199] In some specific embodiments, the extracellular antigen binding domain of the present chimeric cytokine receptor is derived from NKG2D or truncated NKG2D (such as the ECD of NKG2D or truncated NKG2D). In some embodiments, the extracellular antigen binding domain comprises the amino acid sequence of SEQ ID NOs: 6, 156 or 157, or an amino acid sequence having at least 75%, 80%, 90%, 91%, 92%, 93%, 94%, 95%, 96%, 97%, 98%, or 99% identity to SEQ ID NOs: 6, 156 or 157. In other specific embodiments, the extracellular antigen binding domain of the present chimeric cytokine receptor comprises an antibody or antigen binding fragment thereof that binds to an NKG2D ligand. In some embodiments, the extracelluar domain comprises one or more scFv(s) that bind to an NKG2D ligand. In other embodiments, the extracellular domain comprises one or more sdAb(s) (such as one or more V_{H}H domains) that bind to an NKG2D ligand. The NKG2D ligand can be selected from (but not limited to) a group consisting of MICA/B, ULBP-1, ULBP-2,5,6 and ULBP-3. In some embodiment, the NKG2D ligand is MICA/B. In some embodiment, the NKG2D ligand is ULBP-1. In some embodiment, the NKG2D ligand is ULBP-2. In some embodiment, the NKG2D ligand is ULBP-5. In some embodiment, the NKG2D ligand is ULBP-6. In some embodiment, the NKG2D ligand is ULBP-3.

[0200] The determination of percent identity between two sequences (e.g., amino acid sequences or nucleic acid sequences) can be accomplished using a mathematical algorithm. A preferred, non-limiting example of a mathematical algorithm utilized for the comparison of two sequences is the algorithm of Karlin and Altschul, Proc. Natl. Acad. Sci. U.S.A. 87:2264 2268 (1990), modified as in Karlin and Altschul, Proc. Natl. Acad. Sci. U.S.A. 90:5873 5877 (1993). Such an algorithm is incorporated into the NBLAST and XBLAST programs of Altschul et al., J. Mol. Biol. 215:403 (1990). BLAST nucleotide searches can be performed with the NBLAST nucleotide program parameters set, e.g., for score=100, word length=12 to obtain nucleotide sequences homologous to a nucleic acid molecules described herein. BLAST protein searches can be performed with the XBLAST program parameters set, e.g., to score 50, word length=3 to obtain amino acid sequences homologous to a protein molecule described herein. To obtain gapped alignments for comparison purposes, Gapped BLAST can be utilized as described in Altschul et al., Nucleic Acids Res. 25:3389 3402 (1997). Alternatively, PSI BLAST can be used to perform an iterated search which detects distant relationships between molecules (Id.). When utilizing BLAST, Gapped BLAST, and PSI Blast programs, the default parameters of the respective programs (e.g., of XBLAST and NBLAST) can be used (see, e.g., National Center for Biotechnology Information (NCBI) on the worldwide web, ncbi.nlm.nih.gov). Another non-limiting example of a mathematical algorithm utilized for the comparison of sequences is the algorithm of Myers and Miller, CABIOS 4:11-17 (1998). Such an algorithm is incorporated in the ALIGN program (version 2.0) which is part of the GCG sequence alignment software package. When utilizing the ALIGN program for comparing amino acid sequences, a PAM120 weight residue table, a gap length penalty of 12, and a gap penalty of 4 can be used.

[0201] In some embodiments, amino acid sequence modification(s) or variation(s) of the polypeptides described herein are contemplated. Variations may be a substitution, deletion, or insertion of one or more codons encoding the polypeptide that results in a change in the amino acid sequence as compared with the original polypeptide.

[0202] Amino acid substitutions can be the result of replacing one amino acid with another amino acid having similar structural and/or chemical properties, such as the replacement of a leucine with a serine, e.g., conservative amino acid replacements. Standard techniques known to those of skill in the art can be used to introduce mutations in the nucleotide sequence encoding a molecule provided herein, including, for example, site-directed mutagenesis and PCR-mediated mutagenesis which results in amino acid substitutions. Insertions or deletions may optionally be in the range of about 1 to 5 amino acids. In certain embodiments, the substitution, deletion, or insertion includes fewer than 25 amino acid substitutions, fewer than 20 amino acid substitutions, fewer than 15 amino acid substitutions, fewer than 10 amino acid substitutions, fewer than 5 amino acid substitutions, fewer than 4 amino acid substitutions, fewer than 3 amino acid substitutions, or fewer than 2 amino acid substitutions relative to the original molecule. In a specific embodiment, the substitution is a conservative amino acid substitution made at one or more predicted non-essential amino acid residues. The variation allowed may be determined by systematically making insertions, deletions, or substitutions of amino acids in the sequence and testing the resulting variants for activity exhibited by the parental polypeptides.

[0203] The polypeptides generated by conservative amino acid substitutions are included in the present disclosure. In a conservative amino acid substitution, an amino acid residue is replaced with an amino acid residue having a side chain with a similar charge. As described above, families of amino acid residues having side chains with similar charges have been defined in the art. These families include amino acids with basic side chains (e.g., lysine, arginine, histidine), acidic side chains (e.g., aspartic acid, glutamic acid), uncharged polar side chains (e.g., glycine, asparagine, glutamine, serine, threonine, tyrosine, cysteine), nonpolar side chains (e.g., alanine, valine, leucine, isoleucine, proline, phenylalanine, methionine, tryptophan), beta-branched side chains (e.g., threonine, valine, isoleucine) and aromatic side chains (e.g., tyrosine, phenylalanine, tryptophan, histidine). Alternatively, mutations can be introduced randomly along all or part of the coding sequence, such as by saturation mutagenesis, and the resultant mutants can be screened for biological activity to identify mutants that retain activity. Following mutagenesis, the encoded protein can be expressed and the activity of the protein can be determined. Conservative (e.g., within an amino acid group with similar properties and/or side chains) substitutions may be made, so as to maintain or not significantly change the properties.

[0204] Amino acids may be grouped according to similarities in the properties of their side chains (see, e.g., Lehninger, Biochemistry 73-75 (2d ed. 1975)): (1) non-polar: Ala (A), Val (V), Leu (L), Ile (I), Pro (P), Phe (F), Trp (W), Met (M); (2) uncharged polar: Gly (G), Ser (S), Thr (T), Cys (C), Tyr (Y), Asn (N), Gln (Q); (3) acidic: Asp (D), Glu (E); and (4) basic: Lys (K), Arg (R), His(H). Alternatively, naturally occurring residues may be divided into groups based on common side-chain properties: (1) hydrophobic: Norleucine, Met, Ala, Val, Leu, Ile; (2) neutral hydrophilic: Cys, Ser, Thr, Asn, Gln; (3) acidic: Asp, Glu; (4) basic: His, Lys, Arg; (5) residues that influence chain orientation: Gly, Pro; and (6) aromatic: Trp, Tyr, Phe. For example, any cysteine residue not involved in maintaining the proper conformation of the peptide also may be substituted, for example, with another amino acid, such as alanine or serine, to improve the oxidative stability of the molecule and to prevent aberrant crosslinking. Non-conservative substitutions will entail exchanging a member of one of these classes for another class.

[0205] Amino acid sequence insertions include amino- and/or carboxyl-terminal fusions ranging in length from one residue to polypeptides containing a hundred or more residues, as well as intrasequence insertions of single or multiple amino acid residues. The variations can be made using methods known in the art such as oligonucleotide-mediated (site-directed) mutagenesis, alanine scanning, and PCR mutagenesis. Site-directed mutagenesis (see, e.g., Carter, Biochem J. 237:1-7 (1986); and Zoller et al., Nucl. Acids Res. 10:6487-500 (1982)), cassette mutagenesis (see, e.g., Wells et al., Gene 34:315-23 (1985)), or other known techniques can be performed on the cloned DNA to produce the polypeptide variant DNA.

### Signal Peptide

[0206] In certain embodiments, the chimeric cytokine receptor provided herein may comprise a signal peptide (also known as a signal sequence) at the N-terminus of the polypeptide. In general, signal peptides are peptide sequences that target a polypeptide to the desired site in a cell. In some embodiments, the signal peptide targets the effector molecule to the secretory pathway of the cell and will allow for integration and anchoring of the effector molecule into the lipid bilayer. Signal peptides including signal sequences of naturally occurring proteins or synthetic, non-naturally occurring signal sequences, which are compatible for use in the CARs described herein will be evident to one of skill in the art. In some embodiments, the signal peptide is derived from a molecule selected from the group consisting of CD8α, GM-CSF receptor a, and IgG1 heavy chain.

[0207] In another aspect, provided herein is a polynucleotide encoding the chimeric cytokine receptor provided herein. In another aspect, provided herein is an immune cell expressing the chimeric cytokine receptor provided herein.

### Tag Peptide

[0208] In certain embodiments, the chimeric cytokine receptor provided herein may comprises a tag. In some embodiments, the chimeric cytokine receptor may comprises two or more tags. In some embodiments, the tag linking to the chimeric cytokine receptor is different form the tag linking to the functional exogenous receptor.

### 5.2.2. Functional Exogenous Receptors

[0209] In some embodiments, the immune effector cell provided herein further comprises one or more functional exogenous receptor(s). In some embodiments, the functional exogenous receptor is a T cell receptor (TCR), a chimeric antigen receptor (CAR), a chimeric TCR (cTCR), or a T cell antigen coupler (TAC)-like chimeric receptor. In some embodiments, the functional exogenous receptor is a CAR. In other embodiments, the functional exogenous receptor is a TCR.

[0210] Any functional exogenous receptors are included in the present disclosure. Chimeric antigen receptor (CAR) is described in more detail below only as an exemplary functional exogenous receptor provided herein, but does not limit the scope of the present disclosure.

[0211] In some embodiments, the CAR in the present immune effector cells comprises a polypeptide comprising: (a) an extracellular antigen binding domain; (b) a transmembrane domain; and (c) an intracellular signaling domain.

### Extracellular Antigen Binding Domain

[0212] The extracellular antigen binding domain of the CARs described herein comprises one or more antigen binding domains. In some embodiments, the extracellular antigen binding domain of the CAR provided herein is monospecific. In other embodiments, the extracellular antigen binding domain of the CAR provided herein is multispecific. In other embodiments, the extracellular antigen binding domain of the CAR provided herein is monovalent. In other embodiments, the extracellular antigen binding domain of the CAR provided herein is multivalent. In some embodiments, the extracellular antigen binding domain comprises two or more antigen binding domains which are fused to each other directly via peptide bonds, or via peptide linkers. In some embodiments, the extracellular antigen binding domain comprises an antibody or a fragment thereof as described in the context of the extracelluar domain of the chimeric cytokine receptor in Section 5.2.1 above. In case there are multiple binding domains in the extracellular antigen binding domain of the present CARs. The various domains may be fused to each other via peptide linkers. In some embodiments, the domains are directly fused to each other without any peptide linkers. The peptide linkers may be the same or different. Each peptide linker may have the same or different length and/or sequence depending on the structural and/or functional features of the various domains. Each peptide linker may be selected and optimized independently. The length, the degree of flexibility and/or other properties of the peptide linker(s) used in the CARs may have some influence on properties, including but not limited to the affinity, specificity or avidity for one or more particular antigens or epitopes. In some embodiment, a peptide linker comprises flexible residues (such as glycine and serine) so that the adjacent domains are free to move relative to each other. For example, a glycine-serine doublet can be a suitable peptide linker. Additional description of the applicable linkers used herein is provided in Section 5.2.1 above.

[0213] In some embodiments, the extracellular antigen binding domain provided in the present CARs recognizes an antigen that acts as a cell surface marker on target cells associated with a special disease state. In some embodiments, the antigen is a tumor antigen. Tumors express a number of proteins that can serve as a target antigen for an immune response, particularly T cell mediated immune responses. The antigens targeted by the CAR may be antigens on a single diseased cell or antigens that are expressed on different cells that each contribute to the disease. The antigens targeted by the CAR may be directly or indirectly involved in the diseases.

[0214] In some embodiments, the possible antiges targeted by the CAR provided herein is provided above in Section 5.2.1. In some embodiments, the target cell is a cancer cell. In one embodiment, target of the present CAR is a pathogen. In certain embodiments, the target cell is a cell comprising a pathogen. In some embodiments, the pathogen causes an infectious disease. In some embodiments, the pathogen is a bacteria. In some embodiments, the pathogen is a parasite. In some embodiments, the pathogen is a virus.

### Transmembrane Domain

[0215] The CARs of the present disclosure comprise a transmembrane domain that can be directly or indirectly fused to the extracellular antigen binding domain. The transmembrane domain may be derived either from a natural or from a synthetic source. Transmembrane domains compatible for use in the CARs described herein may be obtained from a naturally occurring protein. Alternatively, it can be a synthetic, non-naturally occurring protein segment, e.g., a hydrophobic protein segment that is thermodynamically stable in a cell membrane.

[0216] In some embodiments, the transmembrane domain of the CAR described herein is derived from a Type I single-pass membrane protein. In some embodiments, transmembrane domains from multi-pass membrane proteins may also be compatible for use in the CARs described herein. Multi-pass membrane proteins may comprise a complex (at least 2, 3, 4, 5, 6, 7 or more) alpha helices or a beta sheet structure. In some embodiments, the N-terminus and the C-terminus of a multi-pass membrane protein are present on opposing sides of the lipid bilayer, e.g., the N-terminus of the protein is present on the cytoplasmic side of the lipid bilayer and the C-terminus of the protein is present on the extracellular side.

[0217] Transmembrane domains for use in the CARs described herein can also comprise at least a portion of a synthetic, non-naturally occurring protein segment. In some embodiments, the transmembrane domain is a synthetic, non-naturally occurring alpha helix or beta sheet. In some embodiments, the protein segment is at least approximately 20 amino acids, e.g., at least 18, 19, 20, 21, 22, 23, 24, 25, 26, 27, 28, 29, 30, or more amino acids. Examples of synthetic transmembrane domains are known in the art, for example in U.S. Pat. No. 7,052,906 and PCT Publication No. WO 2000/032776, the relevant disclosures of which are incorporated by reference herein.

[0218] The transmembrane domain provided herein may comprise a transmembrane region and a cytoplasmic region located at the C-terminal side of the transmembrane domain. The cytoplasmic region of the transmembrane domain may comprise three or more amino acids and, in some embodiments, helps to orient the transmembrane domain in the lipid bilayer. In some embodiments, one or more cysteine residues are present in the transmembrane region of the transmembrane domain. In some embodiments, one or more cysteine residues are present in the cytoplasmic region of the transmembrane domain. In some embodiments, the cytoplasmic region of the transmembrane domain comprises positively charged amino acids. In some embodiments, the cytoplasmic region of the transmembrane domain comprises the amino acids arginine, serine, and lysine.

[0219] In some embodiments, the transmembrane region of the transmembrane domain comprises hydrophobic amino acid residues. In some embodiments, the transmembrane domain of the CAR provided herein comprises an artificial hydrophobic sequence. For example, a triplet of phenylalanine, tryptophan and valine may be present at the C terminus of the transmembrane domain. In some embodiments, the transmembrane region comprises mostly hydrophobic amino acid residues, such as alanine, leucine, isoleucine, methionine, phenylalanine, tryptophan, or valine. In some embodiments, the transmembrane region is hydrophobic. In some embodiments, the transmembrane region comprises a poly-leucine-alanine sequence. The hydropathy, or hydrophobic or hydrophilic characteristics of a protein or protein segment, can be assessed by any method known in the art, for example the Kyte and Doolittle hydropathy analysis.

[0220] In some embodiments, the transmembrane domain of the CAR comprises a transmembrane domain chosen from the transmembrane domain of an alpha, beta or zeta chain of a T-cell receptor, CD28, CD3 epsilon, CD45, CD4, CD5, CD8, CD9, CD16, CD22, CD33, CD37, CD64, CD80, CD86, CD134, CD137, CD154, KIRDS2, OX40, CD2, CD27, LFA-1 (CD11a, CD18), ICOS (CD278), 4-1BB (CD137), GITR, CD40, BAFFR, HVEM (LIGHTR), SLAMF7, NKp80 (KLRF1), CD160, CD19, IL-2R beta, IL-2R gamma, IL-7R a, ITGA1, VLA1, CD49a, ITGA4, IA4, CD49D, ITGA6, VLA-6, CD49f, ITGAD, CD11d, ITGAE, CD103, ITGAL, CD11a, LFA-1, ITGAM, CD11b, ITGAX, CD11c, ITGB1, CD29, ITGB2, CD18, LFA-1, ITGB7, TNFR2, DNAM1 (CD226), SLAMF4 (CD244, 2B4), CD84, CD96 (Tactile), CEACAM1, CRT AM, Ly9 (CD229), CD160 (BY55), PSGL1, CDIOO (SEMA4D), SLAMF6 (NTB-A, Lyl08), SLAM (SLAMF1, CD150, IPO-3), BLAME (SLAMF8), SELPLG (CD162), LTBR, PAG/Cbp, NKp44, NKp30, NKp46, NKG2D, and/or NKG2C.

[0221] In some specific embodiments, the transmembrane domain is derived from CD8. In some specific embodiments, the transmembrane domain is derived from CD8α. In other specific embodiments, the transmembrane domain is derived from CD28.

### Intracellular Signaling Domain

[0222] The intracellular signaling domain in the CARs provided herein is responsible for activation of at least one of the normal effector functions of the immune effector cell expressing the CARs. The term “effector function” refers to a specialized function of a cell. Effector function of a T cell, for example, may be cytolytic activity or helper activity including the secretion of cytokines. Thus the term “intracellular signaling domain” refers to the portion of a protein which transduces the effector function signal and directs the cell to perform a specialized function. While usually the entire intracellular signaling domain can be employed, in many cases it is not necessary to use the entire chain. To the extent that a truncated portion of the intracellular signaling domain is used, such truncated portion may be used in place of the intact chain as long as it transduces the effector function signal. The term intracellular signaling domain is thus meant to include any truncated portion of the intracellular signaling domain sufficient to transduce the effector function signal.

[0223] In some embodiments, the intracellular signaling domain comprises a primary intracellular signaling domain of an immune effector cell. In some embodiments, the CAR comprises an intracellular signaling domain consisting essentially of a primary intracellular signaling domain of an immune effector cell. “Primary intracellular signaling domain” refers to cytoplasmic signaling sequence that acts in a stimulatory manner to induce immune effector functions. In some embodiments, the primary intracellular signaling domain contains a signaling motif known as immunoreceptor tyrosine-based activation motif, or ITAM. An “ITAM,” as used herein, is a conserved protein motif that is generally present in the tail portion of signaling molecules expressed in many immune cells. The motif may comprises two repeats of the amino acid sequence YxxL/I separated by 6-8 amino acids, wherein each x is independently any amino acid, producing the conserved motif YxxL/Ix(6-8)YxxL/I. ITAMs within signaling molecules are important for signal transduction within the cell, which is mediated at least in part by phosphorylation of tyrosine residues in the ITAM following activation of the signaling molecule. ITAMs may also function as docking sites for other proteins involved in signaling pathways. Exemplary ITAM-containing primary cytoplasmic signaling sequences include those derived from CD3z, FcR gamma (FCER1G), FcR beta (Fc Epsilon Rib), CD3 gamma, CD3 delta, CD3 epsilon, CD5, CD22, CD79a, CD79b, and CD66d.

### Co-Stimulatory Signaling Domain

[0224] In some embodiments, the CAR comprises at least one co-stimulatory signaling domain. The term “co-stimulatory signaling domain,” as used herein, refers to at least a portion of a protein that mediates signal transduction within a cell to induce an immune response such as an effector function. Many immune effector cells require co-stimulation, in addition to stimulation of an antigen-specific signal, to promote cell proliferation, differentiation and survival, as well as to activate effector functions of the cell.

[0225] The co-stimulatory signaling domain of the chimeric receptor described herein can be an intracellular signaling domain from a co-stimulatory protein, which transduces a signal and modulates responses mediated by immune cells, such as T cells, NK cells, macrophages, neutrophils, or eosinophils. “Co-stimulatory signaling domain” can be the cytoplasmic portion of a co-stimulatory molecule. The term “co-stimulatory molecule” refers to a cognate binding partner on an immune cell (such as T cell) that specifically binds with a co-stimulatory ligand, thereby mediating a co-stimulatory response by the immune cell, such as, but not limited to, proliferation and survival.

[0226] In some embodiments, the intracellular signaling domain comprises a single co-stimulatory signaling domain. In some embodiments, the intracellular signaling domain comprises two or more (such as about any of 2, 3, 4, or more) co-stimulatory signaling domains. In some embodiments, the intracellular signaling domain comprises two or more of the same co-stimulatory signaling domains. In some embodiments, the intracellular signaling domain comprises two or more co-stimulatory signaling domains from different co-stimulatory proteins, such as any two or more co-stimulatory proteins described herein. In some embodiments, the intracellular signaling domain comprises a primary intracellular signaling domain (such as intracellular signaling domain of CD3z) and one or more co-stimulatory signaling domains. In some embodiments, the one or more co-stimulatory signaling domains and the primary intracellular signaling domain (such as intracellular signaling domain of CD3z) are fused to each other via optional peptide linkers. The primary intracellular signaling domain, and the one or more co-stimulatory signaling domains may be arranged in any suitable order. In some embodiments, the one or more co-stimulatory signaling domains are located between the transmembrane domain and the primary intracellular signaling domain (such as intracellular signaling domain of CD3z). Multiple co-stimulatory signaling domains may provide additive or synergistic stimulatory effects.

[0227] Activation of a co-stimulatory signaling domain in a host cell (e.g., an immune cell) may induce the cell to increase or decrease the production and secretion of cytokines, phagocytic properties, proliferation, differentiation, survival, and/or cytotoxicity. The co-stimulatory signaling domain of any co-stimulatory molecule may be compatible for use in the CARs described herein. The type(s) of co-stimulatory signaling domain is selected based on factors such as the type of the immune effector cells in which the effector molecules would be expressed (e.g., T cells, NK cells, macrophages, neutrophils, or eosinophils) and the desired immune effector function (e.g., ADCC effect). Examples of co-stimulatory signaling domains for use in the CARs can be the intracellular signaling domain of co-stimulatory proteins, including, without limitation, members of the B7/CD28 family (e.g., B7-1/CD80, B7-2/CD86, B7-H1/PD-L1, B7-H2, B7-H3, B7-H4, B7-H6, B7-H7, BTLA/CD272, CD28, CTLA-4, Gi24/VISTA/B7-H5, ICOS/CD278, PD-1, PD-L2/B7-DC, and PDCD6); members of the TNF superfamily (e.g., 4-1BB/TNFSF9/CD137, 4-1BB Ligand/TNFSF9, BAFF/BLyS/TNFSF13B, BAFF R/TNFRSF13C, CD27/TNFRSF7, CD27 Ligand/TNFSF7, CD30/TNFRSF8, CD30 Ligand/TNFSF8, CD40/TNFRSF5, CD40/TNFSF5, CD40 Ligand/TNFSF5, DR3/TNFRSF25, GITR/TNFRSF18, GITR Ligand/TNFSF18, HVEM/TNFRSF14, LIGHT/TNFSF14, Lymphotoxin-alpha/TNF-beta, OX40/TNFRSF4, OX40 Ligand/TNFSF4, RELT/TNFRSF19L, TACI/TNFRSF13B, TL1A/TNFSF15, TNF-alpha, and TNF RII/TNFRSF1B); members of the SLAM family (e.g., 2B4/CD244/SLAMF4, BLAME/SLAMF8, CD2, CD2F-10/SLAMF9, CD48/SLAMF2, CD58/LFA-3, CD84/SLAMF5, CD229/SLAMF3, CRACC/SLAMF7, NTB-A/SLAMF6, and SLAM/CD150); and any other co-stimulatory molecules, such as CD2, CD7, CD53, CD82/Kai-1, CD90/Thy1, CD96, CD160, CD200, CD300a/LMIR1, HLA Class I, HLA-DR, Ikaros, Integrin alpha 4/CD49d, Integrin alpha 4 beta 1, Integrin alpha 4 beta 7/LPAM-1, LAG-3, TCL1A, TCL1B, CRTAM, DAP12, Dectin-1/CLEC7A, DPPIV/CD26, EphB6, TIM-1/KIM-1/HAVCR, TIM-4, TSLP, TSLP R, lymphocyte function associated antigen-1 (LFA-1), and NKG2C. In some embodiments, the one or more co-stimulatory signaling domains are selected from the group consisting of CD27, CD28, CD137, OX40, CD30, CD40, CD3, lymphocyte function-associated antigen-1(LFA-1), CD2, CD7, LIGHT, NKG2C, B7-H3 and ligands that specially bind to CD83.

[0228] In some embodiments, the co-stimulatory signaling domains are variants of any of the co-stimulatory signaling domains described herein, such that the co-stimulatory signaling domain is capable of modulating the immune response of the immune cell. In some embodiments, the co-stimulatory signaling domains comprises up to 10 amino acid residue variations (e.g., 1, 2, 3, 4, 5, or 8) as compared to a wild-type counterpart. Such co-stimulatory signaling domains comprising one or more amino acid variations may be referred to as variants. Mutation of amino acid residues of the co-stimulatory signaling domain may result in an increase in signaling transduction and enhanced stimulation of immune responses relative to co-stimulatory signaling domains that do not comprise the mutation. Mutation of amino acid residues of the co-stimulatory signaling domain may result in a decrease in signaling transduction and reduced stimulation of immune responses relative to co-stimulatory signaling domains that do not comprise the mutation.

### Signal Peptide

[0229] In certain embodiments, the CARs provided herein may comprise a signal peptide (also known as a signal sequence) at the N-terminus of the polypeptide. In general, signal peptides are peptide sequences that target a polypeptide to the desired site in a cell. In some embodiments, the signal peptide targets the effector molecule to the secretory pathway of the cell and will allow for integration and anchoring of the effector molecule into the lipid bilayer. Signal peptides including signal sequences of naturally occurring proteins or synthetic, non-naturally occurring signal sequences, which are compatible for use in the CARs described herein will be evident to one of skill in the art. In some embodiments, the signal peptide is derived from a molecule selected from the group consisting of CD8α, GM-CSF receptor a, and IgG1 heavy chain.

### Hinge Region

[0230] In some embodiments, the CARs provided herein comprise a hinge domain that is located between the extracellular antigen binding domain and the transmembrane domain. A hinge domain is an amino acid segment that is generally found between two domains of a protein and may allow for flexibility of the protein and movement of one or both of the domains relative to one another. Any amino acid sequence that provides such flexibility and movement of the extracellular antigen binding domain relative to the transmembrane domain of the effector molecule can be used.

[0231] Hinge domains of antibodies, such as an IgG, IgA, IgM, IgE, or IgD antibodies, are also compatible for use in the pH-dependent chimeric receptor systems described herein. In some embodiments, the hinge domain is the hinge domain that joins the constant domains CH1 and CH2 of an antibody. In some embodiments, the hinge domain is of an antibody and comprises the hinge domain of the antibody and one or more constant regions of the antibody. In some embodiments, the hinge domain comprises the hinge domain of an antibody and the CH3 constant region of the antibody. In some embodiments, the hinge domain comprises the hinge domain of an antibody and the CH2 and CH3 constant regions of the antibody. In some embodiments, the antibody is an IgG, IgA, IgM, IgE, or IgD antibody. In some embodiments, the antibody is an IgG antibody. In some embodiments, the antibody is an IgG1, IgG2, IgG3, or IgG4 antibody. In some embodiments, the hinge region comprises the hinge region and the CH2 and CH3 constant regions of an IgG1 antibody. In some embodiments, the hinge region comprises the hinge region and the CH3 constant region of an IgG1 antibody.

[0232] Non-naturally occurring peptides may also be used as hinge domains for the chimeric receptors described herein. In some embodiments, the hinge domain between the C-terminus of the extracellular ligand-binding domain of an Fc receptor and the N-terminus of the transmembrane domain is a peptide linker, such as a (G×S)n linker, wherein x and n, independently can be an integer between 3 and 12, including 3, 4, 5, 6, 7, 8, 9, 10, 11, 12, or more.

[0233] The hinge domain may contain about 10-100 amino acids, e.g., about any one of 15-75 amino acids, 20-50 amino acids, or 30-60 amino acids. In some embodiments, the hinge domain may be at least about any one of 10, 11, 12, 13, 14, 15, 16, 17, 18, 19, 20, 21, 22, 23, 24, 25, 26, 27, 28, 29, 30, 35, 40, 45, 50, 55, 60, 65, 70, or 75 amino acids in length.

[0234] In some embodiments, the hinge domain is a hinge domain of a naturally occurring protein. Hinge domains of any protein known in the art to comprise a hinge domain are compatible for use in the chimeric receptors described herein. In some embodiments, the hinge domain is at least a portion of a hinge domain of a naturally occurring protein and confers flexibility to the chimeric receptor.

[0235] In some specific embodiments, the hinge domain is derived from CD8α. In some embodiments, the hinge domain is a portion of the hinge domain of CD8α, e.g., a fragment containing at least 15 (e.g., 20, 25, 30, 35, or 40) consecutive amino acids of the hinge domain of CD8α. In other embodiments, the hinge domain is derived from CD28a. In some embodiments, the hinge domain is a portion of the hinge domain of CD28a, e.g., a fragment containing at least 15 (e.g., 20, 25, 30, 35, or 40) consecutive amino acids of the hinge domain of CD28a.

### Tag Peptide

[0236] In some embodiments, the functional exogenous receptor may comprises a tag. In some embodiments, the functional exogenous receptor may comprises two or more tags. In some embodiments, the tag linking to the chimeric cytokine receptor is different form the tag linking to the functional exogenous receptor.

### Exemplary CARs

[0237] Any CARs can be used in the present disclosure, including but not limited to CARs in the present disclosure.

[0238] In certain embodiments, the CAR provided herein comprises amino acid sequences with certain percent identity relative to any one of the exemplary CARs described above and in Section 6 below. In some embodiments, provided herein is a CAR comprising or consisting of an extracellular domain having at least 75%, 80%, 85%, 86%, 87%, 88%, 89%, 90%, 91%, 92%, 93%, 94%, 95%, 96%, 97%, 98%, 99%, or 100% sequence identity to the amino acid sequence of the CARs described above and in Section 6 below.

[0239] In some embodiments, amino acid sequence modification(s) of the CARs described herein are contemplated. For example, it may be desirable to optimize the binding affinity and/or other biological properties of the extracellular domain, including but not limited to specificity, thermostability, expression level, effector functions, glycosylation, reduced immunogenicity, or solubility. Thus, in addition to the extracellular domain described herein, it is contemplated that variants of the domains described herein can be prepared. For example, scFv variants can be prepared by introducing appropriate nucleotide changes into the encoding DNA, and/or by synthesis of the desired antibody or polypeptide. Those skilled in the art who appreciate that amino acid changes may alter post-translational processes of the antibody.

[0240] Variations may be a substitution, deletion, or insertion of one or more codons encoding the polypeptide that results in a change in the amino acid sequence as compared with the original antibody or polypeptide. Sites of interest for substitutional mutagenesis include the CDRs and FRs.

[0241] Amino acid substitutions can be the result of replacing one amino acid with another amino acid having similar structural and/or chemical properties, such as the replacement of a leucine with a serine, e.g., conservative amino acid replacements. Standard techniques known to those of skill in the art can be used to introduce mutations in the nucleotide sequence encoding a molecule provided herein, including, for example, site-directed mutagenesis and PCR-mediated mutagenesis which results in amino acid substitutions. Insertions or deletions may optionally be in the range of about 1 to 5 amino acids. In certain embodiments, the substitution, deletion, or insertion includes fewer than 25 amino acid substitutions, fewer than 20 amino acid substitutions, fewer than 15 amino acid substitutions, fewer than 10 amino acid substitutions, fewer than 5 amino acid substitutions, fewer than 4 amino acid substitutions, fewer than 3 amino acid substitutions, or fewer than 2 amino acid substitutions relative to the original molecule. In a specific embodiment, the substitution is a conservative amino acid substitution made at one or more predicted non-essential amino acid residues. The variation allowed may be determined by systematically making insertions, deletions, or substitutions of amino acids in the sequence and testing the resulting variants for activity exhibited by the parental polypeptides.

[0242] The polypeptides generated by conservative amino acid substitutions are included in the present disclosure. Conservative (e.g., within an amino acid group with similar properties and/or side chains) substitutions may be made, so as to maintain or not significantly change the properties.

[0243] One type of substitutional variant involves substituting one or more hypervariable region residues of a parent antibody (e.g., a humanized or human antibody) or fragment thereof in the extraceullar antigen binding domain of the present CARs. Generally, the resulting variant(s) selected for further study will have modifications (e.g., improvements) in certain biological properties (e.g., increased affinity, reduced immunogenicity) relative to the parent antibody and/or will have substantially retained certain biological properties of the parent antibody. An exemplary substitutional variant is an affinity matured antibody, which may be conveniently generated, e.g., using phage display-based affinity maturation techniques such as those described herein. Briefly, one or more CDR residues are mutated and the variant antibodies displayed on phage and screened for a particular biological activity (e.g. binding affinity).

[0244] Alterations (e.g., substitutions) may be made in CDRs, e.g., to improve antibody affinity. Such alterations may be made in CDR “hotspots,” i.e., residues encoded by codons that undergo mutation at high frequency during the somatic maturation process (see, e.g., Chowdhury, Methods Mol. Biol. 207:179-196 (2008)), and/or SDRs (a-CDRs), with the resulting variant antibody or fragment thereof being tested for binding affinity. Affinity maturation by constructing and reselecting from secondary libraries has been described, e.g., in Hoogenboom et al. in Methods in Molecular Biology 178:1-37 (O'Brien et al., ed., Human Press, Totowa, NJ, (2001).) In some embodiments of affinity maturation, diversity is introduced into the variable genes chosen for maturation by any of a variety of methods (e.g., error-prone PCR, chain shuffling, or oligonucleotide-directed mutagenesis). A secondary library is then created. The library is then screened to identify any antibody variants with the desired affinity. Another method to introduce diversity involves CDR-directed approaches, in which several CDR residues (e.g., 4-6 residues at a time) are randomized. CDR residues involved in antigen binding may be specifically identified, e.g., using alanine scanning mutagenesis or modeling.

[0245] In some embodiments, substitutions, insertions, or deletions may occur within one or more CDRs so long as such alterations do not substantially reduce the ability of the antibody to bind antigen. For example, conservative alterations (e.g., conservative substitutions as provided herein) that do not substantially reduce binding affinity may be made in CDRs. In some embodiments, each CDR either is unaltered, or contains no more than one, two or three amino acid substitutions.

[0246] A useful method for identification of residues or regions of an antibody that may be targeted for mutagenesis is called “alanine scanning mutagenesis” as described by Cunningham and Wells, Science, 244:1081-1085 (1989). Alternatively, or additionally, a crystal structure of an antigen-antibody complex to identify contact points between the antibody and antigen. Such contact residues and neighboring residues may be targeted or eliminated as candidates for substitution. Variants may be screened to determine whether they contain the desired properties.

[0247] Amino acid sequence insertions include amino- and/or carboxyl-terminal fusions ranging in length from one residue to polypeptides containing a hundred or more residues, as well as intrasequence insertions of single or multiple amino acid residues. Examples of terminal insertions include an antibody with an N-terminal methionyl residue. Other insertional variants of the antibody molecule include the fusion to the N- or C-terminus of the antibody to an enzyme (e.g., for ADEPT) or a polypeptide which increases the serum half-life of the antibody.

[0248] The variations can be made using methods known in the art such as oligonucleotide-mediated (site-directed) mutagenesis, alanine scanning, and PCR mutagenesis. Site-directed mutagenesis (see, e.g., Carter, Biochem J. 237:1-7 (1986); and Zoller et al., Nucl. Acids Res. 10:6487-500 (1982)), cassette mutagenesis (see, e.g., Wells et al., Gene 34:315-23 (1985)), or other known techniques can be performed on the cloned DNA to produce the antibody variant DNA.

[0249] Also included in the present disclosure are immune effector cells comprising two or more kinds of functional exogenous receptors, such dual CARs or tandem CARs that binds two different targets.

[0250] In some specific embodiments, the CAR provided herein binds to Glypican-3 (GPC3). GPC3, a 65-kDa protein of 580 amino acids, is a heparan sulfate proteoglycan anchored to the cell membrane by glycosylphosphatidylinositol. GPC3 is expressed in hepatocellular carcinoma (HCC), ovarian clear cell carcinoma (OCCC), melanomas, lung squamous cell carcinomas, hepatoblastomas, nephroblastomas (Wilms' tumors), and yolk sac tumors, as well as in certain stomach cancers, for example, gastric cancers that produce a-fetoprotein. The exact function of secreted and membrane-anchored GPC3 in these cancers is not entirely clear, but it is demonstrated to involve in neoplastic transformation, e.g., in HCC (Shirakawa H., et al, Cancer Sci. 2009; 100:1403-1407). Strikingly, the protein is nearly absent in all other cancer forms. GPC3 sequences are known in the art. In some embodiments, GPC3 comprises the amino acid sequence of at least one selected from GenBank Accession numbers: NM_001164617 and NP_001158089, NM_004484 and NP_004475, NM_001164618 and NP_001158090, and NM_001164619 and NP_001158091. In some specific embodiments, the CAR that binds to GPC3 provided herein comprises the amino acid sequence of SEQ ID NO: 29 or 135.

### 5.2.3. Immune Effector Cells

[0251] “Immune effector cells” are immune cells that can perform immune effector functions. In some embodiments, the immune effector cells express at least FcTRIII and perform ADCC effector function. Examples of immune effector cells which mediate ADCC include peripheral blood mononuclear cells (PBMC), natural killer (NK) cells, monocytes, cytotoxic T cells, neutrophils, and eosinophils.

[0252] In some embodiments, the immune effector cells are T cells. In some embodiments, the T cells are CD4⁺/CD8⁻, CD4⁻/CD8⁺, CD4⁺/CD8⁺, CD4⁻/CD8⁻, or combinations thereof. In some embodiments, the T cells produce IL-2, IFN, and/or TNF upon expressing the CAR and binding to the target cells. In some embodiments, the CD8⁺ T cells lyse antigen-specific target cells upon expressing the CAR and binding to the target cells.

[0253] In some embodiments, the immune effector cells are NK cells. In other embodiments, the immune effector cells can be established cell lines, for example, NK-92 cells.

[0254] In some embodiments, the immune effector cells are differentiated from a stem cell, such as a hematopoietic stem cell, a pluripotent stem cell, an iPS, or an embryonic stem cell.

[0255] The engineered immune effector cells are prepared by introducing the polypeptide provided herein into the immune effector cells, such as T cells. In some embodiments, the polypeptide is introduced to the immune effector cells by transfecting any one of the isolated nucleic acids or any one of the vectors described above.

[0256] Methods of introducing vectors or isolated nucleic acids into a mammalian cell are known in the art. The vectors described can be transferred into an immune effector cell by physical, chemical, or biological methods.

[0257] Physical methods for introducing the vector into an immune effector cell include calcium phosphate precipitation, lipofection, particle bombardment, microinjection, electroporation, and the like. Methods for producing cells comprising vectors and/or exogenous nucleic acids are well-known in the art. See, e.g., Sambrook et al. (2001) Molecular Cloning: A Laboratory Manual, Cold Spring Harbor Laboratory, New York. In some embodiments, the vector is introduced into the cell by electroporation.

[0258] Biological methods for introducing the vector into an immune effector cell include the use of DNA and RNA vectors. Viral vectors have become the most widely used method for inserting genes into mammalian, e.g., human cells.

[0259] Chemical means for introducing the vector into an immune effector cell include colloidal dispersion systems, such as macromolecule complexes, nanocapsules, microspheres, beads, and lipid-based systems including oil-in-water emulsions, micelles, mixed micelles, and liposomes. An exemplary colloidal system for use as a delivery vehicle in vitro is a liposome (e.g., an artificial membrane vesicle).

[0260] In some embodiments, RNA molecules encoding any of the polypeptides described herein may be prepared by a conventional method (e.g., in vitro transcription) and then introduced into the immune effector cells via known methods such as mRNA electroporation. See, e.g., Rabinovich et al., Human Gene Therapy 17:1027-1035 (2006).

[0261] In some embodiments, the transduced or transfected immune effector cell is propagated ex vivo after introduction of the vector or isolated nucleic acid. In some embodiments, the transduced or transfected immune effector cell is cultured to propagate for at least about any of 1 day, 2 days, 3 days, 4 days, 5 days, 6 days, 7 days, 10 days, 12 days, or 14 days. In some embodiments, the transduced or transfected immune effector cell is further evaluated or screened to select the engineered mammalian cell.

[0262] Reporter genes may be used for identifying potentially transfected cells and for evaluating the functionality of regulatory sequences. In general, a reporter gene is a gene that is not present in or expressed by the recipient organism or tissue and that encodes a polypeptide whose expression is manifested by some easily detectable property, e.g., enzymatic activity. Expression of the reporter gene is assayed at a suitable time after the DNA has been introduced into the recipient cells. Suitable reporter genes may include genes encoding luciferase, beta-galactosidase, chloramphenicol acetyl transferase, secreted alkaline phosphatase, or the green fluorescent protein gene (e.g., Ui-Tei et al. FEBS Letters 479: 79-82 (2000)). Suitable expression systems are well known and may be prepared using known techniques or obtained commercially.

[0263] Other methods to confirm the presence of the nucleic acid encoding the polypeptide in the engineered immune effector cell, include, for example, molecular biological assays well known to those of skill in the art, such as Southern and Northern blotting, RT-PCR and PCR; biochemical assays, such as detecting the presence or absence of a particular peptide, e.g., by immunological methods (such as ELISAs and Western blots).

### 5.2.4. Sources of T Cells

[0264] In some embodiments, prior to expansion and genetic modification of the T cells, a source of T cells is obtained from a subject. T cells can be obtained from a number of sources, including peripheral blood mononuclear cells, bone marrow, lymph node tissue, cord blood, thymus tissue, tissue from a site of infection, ascites, pleural effusion, spleen tissue, and tumors. In some embodiments, any number of T cell lines available in the art, may be used. In some embodiments, T cells can be obtained from a unit of blood collected from a subject using any number of techniques known to the skilled artisan, such as Ficoll™ separation. In some embodiments, cells from the circulating blood of an individual are obtained by apheresis. The apheresis product typically contains lymphocytes, including T cells, monocytes, granulocytes, B cells, other nucleated white blood cells, red blood cells, and platelets. In some embodiments, the cells collected by apheresis may be washed to remove the plasma fraction and to place the cells in an appropriate buffer or media for subsequent processing steps. In some embodiments, the cells are washed with phosphate buffered saline (PBS). In some embodiments, the wash solution lacks calcium and may lack magnesium or may lack many if not all divalent cations. Initial activation steps in the absence of calcium may lead to magnified activation. As those of ordinary skill in the art would readily appreciate a washing step may be accomplished by methods known to those in the art, such as by using a semi-automated “flow-through” centrifuge (for example, the Cobe 2991 cell processor, the Baxter CytoMate, or the Haemonetics Cell Saver 5) according to the manufacturer's instructions. After washing, the cells may be resuspended in a variety of biocompatible buffers, such as, for example, Ca²⁺-free, Mg²⁺-free PBS, PlasmaLyte A, or other saline solution with or without buffer. Alternatively, the undesirable components of the apheresis sample may be removed and the cells directly resuspended in culture media.

[0265] In some embodiments, T cells are isolated from peripheral blood lymphocytes by lysing the red blood cells and depleting the monocytes, for example, by centrifugation through a PERCOLL™ gradient or by counterflow centrifugal elutriation. A specific subpopulation of T cells, such as CD3⁺, CD28⁺, CD4⁺, CD8⁺, CD45RA⁺, and CD45RO⁺T cells, can be further isolated by positive or negative selection techniques. For example, in some embodiments, T cells are isolated by incubation with anti-CD3/anti-CD28 (i.e., 3×28)-conjugated beads, such as DYNABEADS© M-450 CD3/CD28 T, for a time period sufficient for positive selection of the desired T cells. In some embodiments, the time period is about 30 minutes. In a further embodiment, the time period ranges from 30 minutes to 36 hours or longer and all integer values there between. In a further embodiment, the time period is at least 1, 2, 3, 4, 5, or 6 hours. In some embodiments, the time period is 10 to 24 hours. In some embodiments, the incubation time period is 24 hours. For isolation of T cells from patients with leukemia, use of longer incubation times, such as 24 hours, can increase cell yield. Longer incubation times may be used to isolate T cells in any situation where there are few T cells as compared to other cell types, such in isolating tumor infiltrating lymphocytes (TIL) from tumor tissue or from immune-compromised individuals. Further, use of longer incubation times can increase the efficiency of capture of CD8⁺ T cells. Thus, in some embodiments, by simply shortening or lengthening the time T cells are allowed to bind to the CD3/CD28 beads and/or by increasing or decreasing the ratio of beads to T cells, subpopulations of T cells can be preferentially selected for or against at culture initiation or at other time points during the process. Additionally, by increasing or decreasing the ratio of anti-CD3 and/or anti-CD28 antibodies on the beads or other surface, subpopulations of T cells can be preferentially selected for or against at culture initiation or at other desired time points. The skilled artisan would recognize that multiple rounds of selection can also be used. In some embodiments, it may be desirable to perform the selection procedure and use the “unselected” cells in the activation and expansion process. “Unselected” cells can also be subjected to further rounds of selection.

[0266] Enrichment of a T cell population by negative selection can be accomplished with a combination of antibodies directed to surface markers unique to the negatively selected cells. One method is cell sorting and/or selection via negative magnetic immuno adherence or flow cytometry that uses a cocktail of monoclonal antibodies directed to cell surface markers present on the cells negatively selected. For example, to enrich for CD4⁺ cells by negative selection, a monoclonal antibody cocktail typically includes antibodies to CD14, CD20, CD11b, CD16, HLA-DR, and CD8. In certain embodiments, it may be desirable to enrich for or positively select for regulatory T cells which typically express CD4⁺, CD25⁺, CD62Lhi, GITR⁺, and FoxP3⁺. Alternatively, in certain embodiments, T regulatory cells are depleted by anti-C25 conjugated beads or other similar method of selection.

[0267] For isolation of a desired population of cells by positive or negative selection, the concentration of cells and surface (e.g., particles such as beads) can be varied. In certain embodiments, it may be desirable to significantly decrease the volume in which beads and cells are mixed together (i.e., increase the concentration of cells), to ensure maximum contact of cells and beads. For example, in one embodiment, a concentration of 2 billion cells/mL is used. In one embodiment, a concentration of 1 billion cells/mL is used. In a further embodiment, greater than 100 million cells/mL is used. In a further embodiment, a concentration of cells of 10, 15, 20, 25, 30, 35, 40, 45, or 50 million cells/mL is used. In yet another embodiment, a concentration of cells from 75, 80, 85, 90, 95, or 100 million cells/mL is used. In further embodiments, concentrations of 125 or 150 million cells/mL can be used. Using high concentrations may result in increased cell yield, cell activation, and cell expansion. Further, use of high cell concentrations may allow more efficient capture of cells that may weakly express target antigens of interest, such as CD28-negative T cells, or from samples where there are many tumor cells present (i.e., leukemic blood, tumor tissue, etc.). Such populations of cells may have therapeutic value and would be desirable to obtain. In some embodiments, using high concentration of cells allows more efficient selection of CD8+ T cells that normally have weaker CD28 expression.

[0268] In some embodiments, it may be desirable to use lower concentrations of cells. By significantly diluting the mixture of T cells and surface (e.g., particles such as beads), interactions between the particles and cells is minimized. This selects for cells that express high amounts of desired antigens to be bound to the particles. For example, CD4⁺ T cells express higher levels of CD28 and are more efficiently captured than CD8+ T cells in dilute concentrations. In some embodiments, the concentration of cells used is 5×10⁶/mL. In some embodiments, the concentration used can be from about 1×10⁵/mL to 1×10⁶/mL, and any integer value in between.

[0269] In some embodiments, the cells may be incubated on a rotator for varying lengths of time at varying speeds at either 2-10° C., or at room temperature.

[0270] T cells for stimulation can also be frozen after a washing step. Without being bound by theory, the freeze and subsequent thaw step may provide a more uniform product by removing granulocytes and to some extent monocytes in the cell population. After the washing step that removes plasma and platelets, the cells may be suspended in a freezing solution. While many freezing solutions and parameters are known in the art and will be useful in this context, one method involves using PBS containing 20% DMSO and 8% human serum albumin, or culture media containing 10% dextran 40 and 5% dextrose, 20% human serum albumin and 7.5% DMSO, or 31.25% plasmalyte-A, 31.25% dextrose 5%, 0.45% NaCl, 10% dextran 40 and 5% dextrose, 20% human serum albumin, and 7.5% DMSO or other suitable cell freezing media containing for example, Hespan and PlasmaLyte A. The cells then are frozen to −80° C. at a rate of 1° C. per minute and stored in the vapor phase of a liquid nitrogen storage tank. Other methods of controlled freezing may be used as well as uncontrolled freezing immediately at −20° C. or in liquid nitrogen.

[0271] In some embodiments, cryopreserved cells are thawed and washed as described herein and allowed to rest for one hour at room temperature prior to activation.

[0272] Also contemplated in the present disclosure is the collection of blood samples or apheresis product from a subject at a time period prior to when the expanded cells as described herein might be needed. As such, the source of the cells to be expanded can be collected at any time point necessary, and desired cells, such as T cells, isolated and frozen for later use in T cell therapy for any number of diseases or conditions that would benefit from T cell therapy, such as those described herein. In one embodiment, a blood sample or an apheresis is taken from a generally healthy subject. In certain embodiments, a blood sample or an apheresis is taken from a generally healthy subject who is at risk of developing a disease, but who has not yet developed a disease, and the cells of interest are isolated and frozen for later use. In certain embodiments, the T cells may be expanded, frozen, and used at a later time. In certain embodiments, samples are collected from a patient shortly after diagnosis of a particular disease as described herein but prior to any treatments. In a further embodiment, the cells are isolated from a blood sample or an apheresis from a subject prior to any number of relevant treatment modalities, including but not limited to treatment with agents such as natalizumab, efalizumab, antiviral agents, chemotherapy, radiation, immunosuppressive agents, such as cyclosporin, azathioprine, methotrexate, mycophenolate, and FK506, antibodies, or other immunoablative agents such as CAMPATH, anti-CD3 antibodies, cytoxan, fludarabine, cyclosporin, FK506, rapamycin, mycophenolic acid, steroids, FR901228, and irradiation. These drugs inhibit either the calcium dependent phosphatase calcineurin (cyclosporine and FK506) or inhibit the p70S6 kinase that is important for growth factor induced signaling (rapamycin) (Liu et al., Cell 66:807-815 (1991); Henderson et al., Immun 73:316-321 (1991); Bierer et al., Curr. Opin. Immun. 5:763-773 (1993)). In a further embodiment, the cells are isolated for a patient and frozen for later use in conjunction with (e.g., before, simultaneously or following) bone marrow or stem cell transplantation, T cell ablative therapy using either chemotherapy agents such as, fludarabine, external-beam radiation therapy (XRT), cyclophosphamide, or antibodies such as OKT3 or CAMPATH. In another embodiment, the cells are isolated prior to and can be frozen for later use for treatment following B-cell ablative therapy such as agents that react with CD20, e.g., Rituxan.

[0273] In some embodiments, T cells are obtained from a patient directly following treatment. In this regard, it has been observed that following certain cancer treatments, in particular treatments with drugs that damage the immune system, shortly after treatment during the period when patients would normally be recovering from the treatment, the quality of T cells obtained may be optimal or improved for their ability to expand ex vivo. Likewise, following ex vivo manipulation using the methods described herein, these cells may be in a preferred state for enhanced engraftment and in vivo expansion. Thus, it is contemplated within the context of the present disclosure to collect blood cells, including T cells, dendritic cells, or other cells of the hematopoietic lineage, during this recovery phase. Further, in certain embodiments, mobilization (for example, mobilization with GM-CSF) and conditioning regimens can be used to create a condition in a subject wherein repopulation, recirculation, regeneration, and/or expansion of particular cell types is favored, especially during a defined window of time following therapy. Illustrative cell types include T cells, B cells, dendritic cells, and other cells of the immune system. 5.2.5. Activation and Expansion of T Cells

[0274] In some embodiments, prior to or after genetic modification of the T cells with the CARs described herein, the T cells can be activated and expanded generally using methods as described, for example, in U.S. Pat. Nos. 6,352,694; 6,534,055; 6,905,680; 6,692,964; 5,858,358; 6,887,466; 6,905,681; 7,144,575; 7,067,318; 7,172,869; 7,232,566; 7,175,843; 5,883,223; 6,905,874; 6,797,514; 6,867,041; and U.S. Patent Application Publication No. 20060121005.

[0275] Generally, T cells can be expanded by contact with a surface having attached thereto an agent that stimulates a CD3/TCR complex associated signal and a ligand that stimulates a co-stimulatory molecule on the surface of the T cells. In particular, T cell populations may be stimulated as described herein, such as by contact with an anti-CD3 antibody, or antigen-binding fragment thereof, or an anti-CD2 antibody immobilized on a surface, or by contact with a protein kinase C activator (e.g., bryostatin) in conjunction with a calcium ionophore. For co-stimulation of an accessory molecule on the surface of the T cells, a ligand that binds the accessory molecule is used. For example, a population of T cells can be contacted with an anti-CD3 antibody and an anti-CD28 antibody, under conditions appropriate for stimulating proliferation of the T cells. To stimulate proliferation of either CD4⁺ T cells or CD8⁺ T cells, an anti-CD3 antibody and an anti-CD28 antibody. Examples of an anti-CD3 antibody include UCHT1, OKT3, HIT3a (BioLegend, San Diego, US) can be used as can other methods commonly known in the art (Graves J, et al., J. Immunol. 146:2102 (1991); Li B, et al., Immunology 116:487 (2005); Rivollier A, et al., Blood 104:4029 (2004)). Examples of an anti-CD28 antibody include 9.3, B-T3, XR-CD28 (Diaclone, Besancon, France) can be used as can other methods commonly known in the art (Berg et al., Transplant Proc. 30(8):3975-3977 (1998); Haanen et al., J. Exp. Med. 190(9):13191328 (1999); Garland et al., J. Immunol Meth. 227(1-2):53-63 (1999)).

[0276] In some embodiments, the primary stimulatory signal and the co-stimulatory signal for the T cell may be provided by different protocols. For example, the agents providing each signal may be in solution or coupled to a surface. When coupled to a surface, the agents may be coupled to the same surface (i.e., in “cis” formation) or to separate surfaces (i.e., in “trans” formation). Alternatively, one agent may be coupled to a surface and the other agent in solution. In one embodiment, the agent providing the co-stimulatory signal is bound to a cell surface and the agent providing the primary activation signal is in solution or coupled to a surface. In certain embodiments, both agents can be in solution. In another embodiment, the agents may be in soluble form, and then cross-linked to a surface, such as a cell expressing Fc receptors or an antibody or other binding agent which will bind to the agents. In this regard, see for example, U.S. Patent Application Publication Nos. 20040101519 and 20060034810 for artificial antigen presenting cells (aAPCs) that are contemplated for use in activating and expanding T cells in certain embodiments in the present disclosure.

[0277] In some embodiments, the T cells, are combined with agent-coated beads, the beads and the cells are subsequently separated, and then the cells are cultured. In an alternative embodiment, prior to culture, the agent-coated beads and cells are not separated but are cultured together. In a further embodiment, the beads and cells are first concentrated by application of a force, such as a magnetic force, resulting in increased ligation of cell surface markers, thereby inducing cell stimulation.

[0278] By way of example, cell surface proteins may be ligated by allowing paramagnetic beads to which anti-CD3 and anti-CD28 are attached (3×28 beads) to contact the T cells. In one embodiment, the cells (for example, 10⁴ to 4×10⁸ T cells) and beads (for example, anti-CD3/CD28 MACSiBead particles at a recommended titer of 1:100) are combined in a buffer, preferably PBS (without divalent cations such as, calcium and magnesium). Those of ordinary skill in the art can readily appreciate any cell concentration may be used. For example, the target cell may be very rare in the sample and comprise only 0.01% of the sample or the entire sample (i.e., 100%) may comprise the target cell of interest. Accordingly, any cell number is within the context of the present disclosure. In certain embodiments, it may be desirable to significantly decrease the volume in which particles and cells are mixed together (i.e., increase the concentration of cells), to ensure maximum contact of cells and particles. For example, in one embodiment, a concentration of about 2 billion cells/mL is used. In another embodiment, greater than 100 million cells/mL is used. In a further embodiment, a concentration of cells of 10, 15, 20, 25, 30, 35, 40, 45, or 50 million cells/mL is used. In yet another embodiment, a concentration of cells from 75, 80, 85, 90, 95, or 100 million cells/mL is used. In further embodiments, concentrations of 125 or 150 million cells/mL can be used. Using high concentrations may result in increased cell yield, cell activation, and cell expansion. Further, use of high cell concentrations may allow more efficient capture of cells that may weakly express target antigens of interest, such as CD28-negative T cells. Such populations of cells may have therapeutic value and would be desirable to obtain in certain embodiments. For example, using high concentration of cells allows more efficient selection of CD8+ T cells that normally have weaker CD28 expression.

[0279] In some embodiments, the mixture may be cultured for several hours (about 3 hours) to about 14 days or any hourly integer value in between. In another embodiment, the mixture may be cultured for 21 days. In one embodiment, the beads and the T cells are cultured together for about eight days. In another embodiment, the beads and T cells are cultured together for 2-3 days. Several cycles of stimulation may also be desired such that culture time of T cells can be 60 days or more. Conditions appropriate for T cell culture include an appropriate media (e.g., Minimal Essential Media or RPMI Media 1640 or X-vivo 15 (Lonza)) that may contain factors necessary for proliferation and viability, including serum (e.g., fetal bovine or human serum), interleukin-2 (IL-2), insulin, IFN-γ, IL-4, IL-7, GM-CSF, IL-10, IL-12, IL-15, TGFβ, and TNF-α or any other additives for the growth of cells known to the skilled artisan. Other additives for the growth of cells include, but are not limited to, surfactant, plasmanate, and reducing agents such as N-acetyl-cysteine and 2-mercaptoethanol. Media can include RPMI 1640, AIM-V, DMEM, MEM, α-MEM, F-12, X-Vivo 15, X-Vivo 20, optimizer, with added amino acids, sodium pyruvate, and vitamins, either serum-free or supplemented with an appropriate amount of serum (or plasma) or a defined set of hormones, and/or an amount of cytokine(s) sufficient for the growth and expansion of T cells. Antibiotics, e.g., penicillin and streptomycin, are included only in experimental cultures, not in cultures of cells that are to be infused into a subject. The target cells are maintained under conditions necessary to support growth, for example, an appropriate temperature (e.g., 37° C.) and atmosphere (e.g., air plus 5% CO₂). T cells that have been exposed to varied stimulation times may exhibit different characteristics. For example, typical blood or apheresed peripheral blood mononuclear cell products have a helper T cell population (TH, CD4⁺) that is greater than the cytotoxic or suppressor T cell population (TC, CD8). Ex vivo expansion of T cells by stimulating CD3 and CD28 receptors produces a population of T cells that prior to about days 8-9 consists predominately of TH cells, while after about days 8-9, the population of T cells comprises an increasingly greater population of TC cells. Accordingly, depending on the purpose of treatment, infusing a subject with a T cell population comprising predominately of TH cells may be advantageous. Similarly, if an antigen-specific subset of TC cells has been isolated it may be beneficial to expand this subset to a greater degree.

[0280] Further, in addition to CD4 and CD8 markers, other phenotypic markers vary significantly, but in large part, reproducibly during the course of the cell expansion process. Thus, such reproducibility enables the ability to tailor an activated T cell product for specific purposes. 5.3. Polypeptides Comprising a Functional Exogenous Receptor and Chimeric Cytokine Receptor

[0281] In another aspect, provided herein is a polypeptide comprising at least one functional exogenous receptor (such as CAR, TCR and TAC) and a chimeric cytokine receptor provided herein. The chimeric cytokine receptor in the present polypeptide can be any of those described in Section 5.2.1 above. The functional exogenous receptor in the present polypeptide can be any of those described in Section 5.2.2 above.

[0282] In the present polypeptides, the chimeric cytokine receptor may be at the N-terminus of the functional exogenous receptor, or the chimeric cytokine receptor may be at the C-terminus of the functional exogenous receptor.

[0283] In some embodiments of the various polypeptides provided herein, the chimeric cytokine receptor and the functional exogenous receptor are linked with each other via a peptide linker. In some embodiments, the peptide linker is a self-cleaving peptide such as 2A self-cleaving peptide, so that the chimeric cytokine receptor and the functional exogenous receptor become separate polypeptides upon cleavage in cells.

[0284] The members of 2A peptides are named after the virus in which they have been first described. For example, F2A, the first described 2A peptide, is derived from foot-and-mouth disease virus. The self-cleaving 18-22 amino acids long 2A peptides mediate ‘ribosomal skipping’ between the proline and glycine residues and inhibit peptide bond formation without affecting downstream translation. These peptides allow multiple proteins to be encoded as polyproteins, which dissociate into component proteins upon translation. Self-cleaving peptides are found in members of the picornaviridae virus family, including aphthoviruses such as foot-and-mouth disease virus (FMDV), equine rhinitis A virus (ERAV), thosea asigna virus (TaV) and porcine teschovirus-1 (PTV-1) (see Donnelly et al., J. Gen. Virol., 82: 1027-101 (2001); Ryan et al., J. Gen. Virol., 72: 2727-2732 (2001)) and cardioviruses such as theilovirus (e.g., theiler's murine encephalomyelitis) and encephalomyocarditis viruses. The 2A peptides derived from FMDV, ERAV, PTV-1, and TaV are sometimes referred to as “F2A,” “E2A,” “P2A,” and “T2A,” respectively, and are included in the present disclosure, e.g., as described in Donnelly et al., J. Gen. Virol., 78: 13-21 (1997); Ryan and Drew, EMBO J., 13: 928-933 (1994); Szymczak et al., Nature Biotech., 5: 589-594 (2004); Hasegawa et al., Stem Cells, 25(7): 1707-12 (2007). In yet other embodiments, intein mediated protein splicing system is used herein, e.g., as described in Shah and Muir, Chem Sci., 5(1): 446-461 (2014) and Topilina and Mills, Mobile DNA, 5 (5) (2014). Other methods known in the art can also be used in the present constructs.

[0285] In some embodiments, the 2A self-cleaving peptide is selected from a group consisting of F2A, E2A, P2A, T2A, or variants thereof. In some embodiments, the self-cleaving peptide is a 2A self-cleaving peptide P2A fragment. In a specific embodiment, the self-cleaving peptide is T2A fragment.

[0286] In another aspect, provided herein is a nucleic acid encoding a polypeptide described above comprising a functional exogenous receptor (such as a CAR) provided herein and a functional exogenous receptor, which is described in more detail below.

### 5.4. Polynucleotides

[0287] In another aspect, the disclosure provides polynucleotides that encode the polypeptide provided herein, including those described in Section 5.2 and Section 5.3 above.

[0288] More specifically, in some embodiments, provided herein is a polynucleotide encoding a polypeptide comprising a chimeric cytokine receptor and a functional exogenous receptor (suchy as a CAR), wherein the chimeric cytokine receptor and the functional exogenous receptor are linked with each other by peptide linkers, such as 2A self-cleaving peptide linkers.

[0289] In yet another aspect, provided herein is a polynucleotide comprising a region encoding a chimeric cytokine receptor provided herein (e.g., as those described in Section 5.2.1) and a region encoding a functional exogenous receptor provided herein (e.g., as those described in Section 5.2.2). In some embodiments, the two regions are controlled by the same promoter. For example, in some embodiments, internal ribosomal entry sites (IRES) are used herein to express multiple genes from one promoter. In other embodiments, these regions are controlled by separate promoters.

[0290] In yet another aspect, provided herein is a composition comprising a first polynucleotide encoding a chimeric cytokine receptor provided herein (e.g., as those described in Section 5.2.1), a second polynucleotide encoding a functional exogenous receptor provided herein (e.g., as those described in Section 5.2.2).

[0291] The polynucleotides of the disclosure can be in the form of RNA or in the form of DNA. DNA includes cDNA, genomic DNA, and synthetic DNA; and can be double-stranded or single-stranded, and if single stranded can be the coding strand or non-coding (anti-sense) strand. In some embodiments, the polynucleotide is in the form of cDNA. In some embodiments, the polynucleotide is a synthetic polynucleotide.

[0292] The present disclosure further relates to variants of the polynucleotides described herein, wherein the variant encodes, for example, fragments, analogs, and/or derivatives of the polypeptide of the disclosure. In certain embodiments, the present disclosure provides a polynucleotide comprising a polynucleotide having a nucleotide sequence at least about 75% identical, at least about 80% identical, at least about 85% identical, at least about 90% identical, at least about 95% identical, and in some embodiments, at least about 96%, 97%, 98% or 99% identical to a polynucleotide encoding the polypeptide of the disclosure. As used herein, the phrase “a polynucleotide having a nucleotide sequence at least, for example, 95% “identical” to a reference nucleotide sequence” is intended to mean that the nucleotide sequence of the polynucleotide is identical to the reference sequence except that the polynucleotide sequence can include up to five point mutations per each 100 nucleotides of the reference nucleotide sequence. In other words, to obtain a polynucleotide having a nucleotide sequence at least 95% identical to a reference nucleotide sequence, up to 5% of the nucleotides in the reference sequence can be deleted or substituted with another nucleotide, or a number of nucleotides up to 5% of the total nucleotides in the reference sequence can be inserted into the reference sequence. These mutations of the reference sequence can occur at the 5′ or 3′ terminal positions of the reference nucleotide sequence or anywhere between those terminal positions, interspersed either individually among nucleotides in the reference sequence or in one or more contiguous groups within the reference sequence.

[0293] The polynucleotide variants can contain alterations in the coding regions, non-coding regions, or both. In some embodiments, a polynucleotide variant contains alterations which produce silent substitutions, additions, or deletions, but does not alter the properties or activities of the encoded polypeptide. In some embodiments, a polynucleotide variant comprises silent substitutions that results in no change to the amino acid sequence of the polypeptide (due to the degeneracy of the genetic code). Polynucleotide variants can be produced for a variety of reasons, for example, to optimize codon expression for a particular host (i.e., change codons in the human mRNA to those preferred by a bacterial host such as E. coli). In some embodiments, a polynucleotide variant comprises at least one silent mutation in a non-coding or a coding region of the sequence.

[0294] In some embodiments, a polynucleotide variant is produced to modulate or alter expression (or expression levels) of the encoded polypeptide. In some embodiments, a polynucleotide variant is produced to increase expression of the encoded polypeptide. In some embodiments, a polynucleotide variant is produced to decrease expression of the encoded polypeptide. In some embodiments, a polynucleotide variant has increased expression of the encoded polypeptide as compared to a parental polynucleotide sequence. In some embodiments, a polynucleotide variant has decreased expression of the encoded polypeptide as compared to a parental polynucleotide sequence.

### 5.5. Vectors

[0295] Also provided are vectors comprising the polynucleotides or nucleic acid molecules described herein. In one embodiment, the nucleic acid molecules can be incorporated into a recombinant expression vector.

[0296] The present disclosure provides vectors for cloning and expressing any one of the polypeptides described herein. In some embodiments, the vector is suitable for replication and integration in eukaryotic cells, such as mammalian cells. In some embodiments, the vector is a viral vector. Examples of viral vectors include, but are not limited to, adenoviral vectors, adeno-associated virus vectors, lentiviral vector, retroviral vectors, vaccinia vector, herpes simplex viral vector, and derivatives thereof. Viral vector technology is well known in the art and is described, for example, in Sambrook et al. (2001, Molecular Cloning: A Laboratory Manual, Cold Spring Harbor Laboratory, New York), and in other virology and molecular biology manuals.

[0297] A number of viral based systems have been developed for gene transfer into mammalian cells. For example, retroviruses provide a convenient platform for gene delivery systems. The heterologous nucleic acid can be inserted into a vector and packaged in retroviral particles using techniques known in the art. The recombinant virus can then be isolated and delivered to the engineered mammalian cell in vitro or ex vivo. A number of retroviral systems are known in the art. In some embodiments, adenovirus vectors are used. A number of adenovirus vectors are known in the art. In some embodiments, lentivirus vectors are used. In some embodiments, self-inactivating lentiviral vectors are used. For example, self-inactivating lentiviral vectors carrying the immunomodulator (such as immune checkpoint inhibitor) coding sequence and/or self-inactivating lentiviral vectors carrying chimeric antigen receptors can be packaged with protocols known in the art. The resulting lentiviral vectors can be used to transduce a mammalian cell (such as primary human T cells) using methods known in the art. Vectors derived from retroviruses such as lentivirus are suitable tools to achieve long-term gene transfer, because they allow long-term, stable integration of a transgene and its propagation in progeny cells. Lentiviral vectors also have low immunogenicity, and can transduce non-proliferating cells.

[0298] In some embodiments, the vector comprises any one of the nucleic acids encoding a polypeptide described herein. The nucleic acid can be cloned into the vector using any known molecular cloning methods in the art, including, for example, using restriction endonuclease sites and one or more selectable markers. In some embodiments, the nucleic acid is operably linked to a promoter. Varieties of promoters have been explored for gene expression in mammalian cells, and any of the promoters known in the art may be used in the present disclosure. Promoters may be roughly categorized as constitutive promoters or regulated promoters, such as inducible promoters.

[0299] In some embodiments, the nucleic acid encoding the polypeptide is operably linked to a constitutive promoter. Constitutive promoters allow heterologous genes (also referred to as transgenes) to be expressed constitutively in the host cells. Exemplary constitutive promoters contemplated herein include, but are not limited to, murine stem cell virus (MSCV) promoter, cytomegalovirus (CMV) promoters, human elongation factors-1 alpha (hEFla), ubiquitin C promoter (UbiC), phosphoglycerokinase promoter (PGK), simian virus 40 early promoter (SV40), and chicken β-Actin promoter coupled with CMV early enhancer (CAGG). The efficiencies of such constitutive promoters on driving transgene expression have been widely compared in a huge number of studies. For example, Michael C. Milone et al compared the efficiencies of CMV, hEFla, UbiC and PGK to drive chimeric antigen receptor expression in primary human T cells, and concluded that hEFla promoter not only induced the highest level of transgene expression, but was also optimally maintained in the CD4 and CD8 human T cells (Molecular Therapy, 17(8): 1453-1464 (2009)). In some embodiments, the nucleic acid encoding the CAR is operably linked to a hEF1α promoter. In some embodiments, the nucleic acid encoding the CAR is operably linked to a MSCV promoter.

[0300] In some embodiments, the nucleic acid encoding the polypeptide is operably linked to an inducible promoter. Inducible promoters belong to the category of regulated promoters. The inducible promoter can be induced by one or more conditions, such as a physical condition, microenvironment of the engineered immune effector cell, or the physiological state of the engineered immune effector cell, an inducer (i.e., an inducing agent), or a combination thereof.

[0301] In some embodiments, the inducing condition does not induce the expression of endogenous genes in the engineered mammalian cell, and/or in the subject that receives the pharmaceutical composition. In some embodiments, the inducing condition is selected from the group consisting of: inducer, irradiation (such as ionizing radiation, light), temperature (such as heat), redox state, tumor environment, and the activation state of the engineered mammalian cell.

[0302] In some embodiments, the vector also contains a selectable marker gene or a reporter gene to select cells expressing the polypeptide from the population of host cells transfected through lentiviral vectors. Both selectable markers and reporter genes may be flanked by appropriate regulatory sequences to enable expression in the host cells. For example, the vector may contain transcription and translation terminators, initiation sequences, and promoters useful for regulation of the expression of the nucleic acid sequences.

### 5.6. Methods of Making

[0303] In yet another aspect, provided herein is a method for making an engineered immune effector cell (e.g., a CAR-T cell or a TCR-T cell or a TAC-T cell), comprising introducing one or more polynucleotide(s) or the vector(s) provided herein (e.g., as described in Section 5.4 and Section 5.5 above) into an immune effector cell (e.g., a T cell).

[0304] More specifically, in some embodiments, engineered immune effector cells provided herein can be produced by introducing one or more nucleic acid(s) encoding a polypeptide described in Section 5.3 or one or more nucleic acid(s) described in Section 5.4 into T cells.

[0305] The chimeric cytokine receptor and the functional exogenous receptor can each be introduced into T cells separately as separately polypeptides.

[0306] Alternatively, engineered immune effector cells provided herein can be produced by a polynucleotide comprising multiple regions, for example, a region encoding a CAR, a region encoding a chimeric cytokine receptor. Different regions can be controlled by the same promoter. For example, in some embodiments, internal ribosomal entry sites (IRES) are used herein to express multiple genes from one promoter. In other embodiments, different regions are controlled by separate promoters.

[0307] In yet another aspect, provided herein is an engineered immune effector cell (e.g., a CAR-T cell) produced according to the method provided herein.

[0308] The methods described above in the context of CAR-T cells are also applicable to production of other immune effector cells such as TCR-T cells and TAC-T cells.

### 5.7. Pharmaceutical Compositions

[0309] In one aspect, the present disclosure further provides pharmaceutical compositions comprising an engineered cell of the present disclosure. In some embodiments, a pharmaceutical composition comprises a therapeutically effective amount of the engineered T cell of the present disclosure and a pharmaceutically acceptable excipient.

[0310] In a specific embodiment, the term “excipient” can also refer to a diluent, adjuvant (e.g., Freunds' adjuvant (complete or incomplete), carrier or vehicle. Pharmaceutical excipients can be sterile liquids, such as water and oils, including those of petroleum, animal, vegetable or synthetic origin, such as peanut oil, soybean oil, mineral oil, sesame oil and the like. Saline solutions and aqueous dextrose and glycerol solutions can also be employed as liquid excipients. Suitable pharmaceutical excipients include starch, glucose, lactose, sucrose, gelatin, malt, rice, flour, chalk, silica gel, sodium stearate, glycerol monostearate, talc, sodium chloride, dried skim milk, glycerol, propylene, glycol, water, ethanol and the like. The composition, if desired, can also contain minor amounts of wetting or emulsifying agents, or pH buffering agents. These compositions can take the form of solutions, suspensions, emulsion, tablets, pills, capsules, powders, sustained-release formulations and the like. Examples of suitable pharmaceutical excipients are described in Remington's Pharmaceutical Sciences (1990) Mack Publishing Co., Easton, PA. Such compositions will contain a prophylactically or therapeutically effective amount of the active ingredient provided herein, such as in purified form, together with a suitable amount of excipient so as to provide the form for proper administration to the patient. The formulation should suit the mode of administration.

[0311] In some embodiments, the choice of excipient is determined in part by the particular cell, and/or by the method of administration. Accordingly, there are a variety of suitable formulations.

[0312] Typically, acceptable carriers, excipients, or stabilizers are nontoxic to recipients at the dosages and concentrations employed, and include buffers, antioxidants including ascorbic acid, methionine, Vitamin E, sodium metabisulfite; preservatives, isotonicifiers, stabilizers, metal complexes (e.g. Zn-protein complexes); chelating agents such as EDTA and/or non-ionic surfactants.

[0313] Buffers may be used to control the pH in a range which optimizes the therapeutic effectiveness, especially if stability is pH dependent. Suitable buffering agents for use with the present disclosure include both organic and inorganic acids and salts thereof. For example, citrate, phosphate, succinate, tartrate, fumarate, gluconate, oxalate, lactate, acetate. Additionally, buffers may comprise histidine and trimethylamine salts such as Tris.

[0314] Preservatives may be added to retard microbial growth. Suitable preservatives for use with the present disclosure include octadecyldimethylbenzyl ammonium chloride; hexamethonium chloride; benzalkonium halides (e.g., chloride, bromide, iodide), benzethonium chloride; thimerosal, phenol, butyl or benzyl alcohol; alkyl parabens such as methyl or propyl paraben; catechol; resorcinol; cyclohexanol, 3-pentanol, and m-cresol.

[0315] Tonicity agents, sometimes known as “stabilizers” can be present to adjust or maintain the tonicity of liquid in a composition. When used with large, charged biomolecules such as proteins and antibodies, they are often termed “stabilizers” because they can interact with the charged groups of the amino acid side chains, thereby lessening the potential for inter and intra-molecular interactions. Exemplary tonicity agents include polyhydric sugar alcohols, trihydric or higher sugar alcohols, such as glycerin, erythritol, arabitol, xylitol, sorbitol and mannitol.

[0316] Additional exemplary excipients include: (1) bulking agents, (2) solubility enhancers, (3) stabilizers and (4) agents preventing denaturation or adherence to the container wall. Such excipients include: polyhydric sugar alcohols (enumerated above); amino acids such as alanine, glycine, glutamine, asparagine, histidine, arginine, lysine, ornithine, leucine, 2-phenylalanine, glutamic acid, threonine, etc.; organic sugars or sugar alcohols such as sucrose, lactose, lactitol, trehalose, stachyose, mannose, sorbose, xylose, ribose, ribitol, myoinisitose, myoinisitol, galactose, galactitol, glycerol, cyclitols (e.g., inositol), polyethylene glycol; sulfur containing reducing agents, such as urea, glutathione, thioctic acid, sodium thioglycolate, thioglycerol, a-monothioglycerol and sodium thio sulfate; low molecular weight proteins such as human serum albumin, bovine serum albumin, gelatin or other immunoglobulins; hydrophilic polymers such as polyvinylpyrrolidone; monosaccharides (e.g., xylose, mannose, fructose, glucose; disaccharides (e.g., lactose, maltose, sucrose); trisaccharides such as raffinose; and polysaccharides such as dextrin or dextran.

[0317] Non-ionic surfactants or detergents (also known as “wetting agents”) may be present to help solubilize the therapeutic agent as well as to protect the therapeutic protein against agitation-induced aggregation, which also permits the formulation to be exposed to shear surface stress without causing denaturation of the active therapeutic protein or antibody. Suitable non-ionic surfactants include, e.g., polysorbates (20, 40, 60, 65, 80, etc.), polyoxamers (184, 188, etc.), PLURONIC® polyols, TRITON®, polyoxyethylene sorbitan monoethers (TWEEN®-20, TWEEN®-80, etc.), lauromacrogol 400, polyoxyl 40 stearate, polyoxyethylene hydrogenated castor oil 10, 50 and 60, glycerol monostearate, sucrose fatty acid ester, methyl celluose and carboxymethyl cellulose. Anionic detergents that can be used include sodium lauryl sulfate, dioctyle sodium sulfosuccinate and dioctyl sodium sulfonate. Cationic detergents include benzalkonium chloride or benzethonium chloride.

[0318] The route of administration is in accordance with known and accepted methods, such as by single or multiple bolus or infusion over a long period of time in a suitable manner, e.g., injection or infusion by subcutaneous, intravenous, intraperitoneal, intramuscular, intraarterial, intralesional or intraarticular routes, topical administration, inhalation or by sustained release or extended-release means.

[0319] In another embodiment, a pharmaceutical composition can be provided as a controlled release or sustained release system. In one embodiment, a pump may be used to achieve controlled or sustained release (see, e.g., Sefton, Crit. Ref Biomed. Eng. 14:201-40 (1987); Buchwald et al., Surgery 88:507-16 (1980); and Saudek et al., N. Engl. J. Med. 321:569-74 (1989)). In another embodiment, polymeric materials can be used to achieve controlled or sustained release of a prophylactic or therapeutic agent (e.g., a fusion protein as described herein) or a composition provided herein (see, e.g., Medical Applications of Controlled Release (Langer and Wise eds., 1974); Controlled Drug Bioavailability, Drug Product Design and Performance (Smolen and Ball eds., 1984); Ranger and Peppas, J. Macromol. Sci. Rev. Macromol. Chem. 23:61-126 (1983); Levy et al., Science 228:190-92 (1985); During et al., Ann. Neurol. 25:351-56 (1989); Howard et al., J. Neurosurg. 71:105-12 (1989); U.S. Pat. Nos. 5,679,377; 5,916,597; 5,912,015; 5,989,463; and 5,128,326; PCT Publication Nos. WO 99/15154 and WO 99/20253). Examples of polymers used in sustained release formulations include, but are not limited to, poly(2-hydroxy ethyl methacrylate), poly(methyl methacrylate), poly(acrylic acid), poly(ethylene-co-vinyl acetate), poly(methacrylic acid), polyglycolides (PLG), polyanhydrides, poly(N-vinyl pyrrolidone), poly(vinyl alcohol), polyacrylamide, poly(ethylene glycol), polylactides (PLA), poly(lactide-co-glycolides) (PLGA), and polyorthoesters. In one embodiment, the polymer used in a sustained release formulation is inert, free of leachable impurities, stable on storage, sterile, and biodegradable. In yet another embodiment, a controlled or sustained release system can be placed in proximity of a particular target tissue, for example, the nasal passages or lungs, thus requiring only a fraction of the systemic dose (see, e.g., Goodson, Medical Applications of Controlled Release Vol. 2, 115-38 (1984)). Controlled release systems are discussed, for example, by Langer, Science 249:1527-33 (1990). Any technique known to one of skill in the art can be used to produce sustained release formulations comprising one or more agents as described herein (see, e.g., U.S. Pat. No. 4,526,938, PCT publication Nos. WO 91/05548 and WO 96/20698, Ning et al., Radiotherapy & Oncology 39:179-89 (1996); Song et al., PDA J. of Pharma. Sci. & Tech. 50:372-97 (1995); Cleek et al., Pro. Int'l. Symp. Control. Rel. Bioact. Mater. 24:853-54 (1997); and Lam et al., Proc. Int'l. Symp. Control Rel. Bioact. Mater. 24:759-60 (1997)).

[0320] The pharmaceutical compositions described herein may also contain more than one active compound or agent as necessary for the particular indication being treated. Alternatively, or in addition, the composition may comprise a cytotoxic agent, chemotherapeutic agent, cytokine, immunosuppressive agent, or growth inhibitory agent. Such molecules are suitably present in combination in amounts that are effective for the purpose intended.

[0321] The active ingredients may also be entrapped in microcapsules prepared, for example, by coascervation techniques or by interfacial polymerization, for example, hydroxymethylcellulose or gelatin-microcapsules and poly-(methylmethacylate) microcapsules, respectively, in colloidal drug delivery systems (for example, liposomes, albumin microspheres, microemulsions, nano-particles and nanocapsules) or in macroemulsions. Such techniques are disclosed in Remington's Pharmaceutical Sciences 18th edition.

[0322] Various compositions and delivery systems are known and can be used with the therapeutic agents provided herein, including, but not limited to, encapsulation in liposomes, microparticles, microcapsules, recombinant cells capable of expressing the single domain antibody or therapeutic molecule provided herein, construction of a nucleic acid as part of a retroviral or other vector, etc.

[0323] In some embodiments, the pharmaceutical composition provided herein contains the binding molecules and/or cells in amounts effective to treat or prevent the disease or disorder, such as a therapeutically effective or prophylactically effective amount. Therapeutic or prophylactic efficacy in some embodiments is monitored by periodic assessment of treated subjects. For repeated administrations over several days or longer, depending on the condition, the treatment is repeated until a desired suppression of disease symptoms occurs. However, other dosage regimens may be useful and can be determined.

### 5.8. Methods and Uses

[0324] The methods disclosed herein can be used for various therapeutic purposes. In one aspect, the disclosure provides methods for treating a cancer in a subject, methods of reducing the rate of the increase of volume of a tumor in a subject overtime, methods of reducing the risk of developing a metastasis, or methods of reducing the risk of developing an additional metastasis in a subject. In some embodiments, the treatment can halt, slow, retard, or inhibit progression of a cancer. In some embodiments, the treatment can result in the reduction of in the number, severity, and/or duration of one or more symptoms of the cancer in a subject.

[0325] As used herein, in some embodiments, the treatment provided herein delay development of a disease or disorder, e.g., defer, hinder, slow, retard, stabilize, suppress and/or postpone development of the disease (such as cancer). This delay can be of varying lengths of time, depending on the history of the disease and/or individual being treated. As is evident to one skilled in the art, a sufficient or significant delay can, in effect, encompass prevention, in that the individual does not develop the disease or disorder. For example, a late stage cancer, such as development of metastasis, may be delayed. In other embodiments, the method or the use provided herein prevents a disease or disorder.

[0326] In some embodiments, the present cell therapies comprise therapies comprising T cells expressing the various CARs, TCRs, cTCRs, TACs, TAC-like chimeric receptors, CARs and CCR(s), TCRs and CCR(s), cTCRs and CCR(s), TACs and CCR(s), TAC-like chimeric receptors and CCR(s), or combinations thereof, described herein. In some embodiments, the present CAR-T cell therapies are used for treating solid tumor cancer. In other embodiments, the present CAR-T cell therapies are used for treating blood cancer.

[0327] In some embodiments, the subject has GPC3, AFP, Claudin 18.2, CD19, CD20, CD22, BCMA, GD2, DLL3, MSLN, CD30, CLL1 or CD33-positive cancer. In some embodiments, the subject has liver cancer (e.g., hepatocellular carcinoma), glioma, lung cancer, colorectal cancer, head and neck cancer, stomach cancer, renal cancer, urothelial cancer, testis cancer, breast cancer, cervical cancer, endometrial cancer, and/or ovarian cancer. In some embodiments, the subject has squamous cell lung carcinoma, or solid tumor. In some embodiments, the subject has a CNS tumor, thyroid cancer, gastrointestinal cancer, skin cancer, sarcoma, urogenital cancer, and/or germ cell tumor. GPC3-related cancers can be found, e.g., in Moek, Kirsten L., et al., The American Journal of Pathology 188.9 (2018): 1973-1981, which is incorporated herein by reference in its entirety.

[0328] In other embodiments, the disease or disorder is an autoimmune and inflammatory disease. In other embodiments, the disease or disorder is an infectious disease. In some embodiments, the inflammatory or autoimmune disease is selected from the group consisting of arthritis, colitis, psoriasis, severe asthma, and moderate to severe Crohn's disease.

[0329] In some embodiments, the disease or disorder is a hematological cancer, such as leukemia, lymphoma, or myeloma. In some embodiments, the cancer is selected from a group consisting of Hodgkin's lymphoma, non-Hodgkin's lymphoma (NHL), cutaneous B-cell lymphoma, activated B-cell lymphoma, diffuse large B-cell lymphoma (DLBCL), mantle cell lymphoma (MCL), follicular center lymphoma, transformed lymphoma, lymphocytic lymphoma of intermediate differentiation, intermediate lymphocytic lymphoma (ILL), diffuse poorly differentiated lymphocytic lymphoma (PDL), centrocytic lymphoma, diffuse small-cleaved cell lymphoma (DSCCL), peripheral T-cell lymphomas (PTCL), cutaneous T-Cell lymphoma, mantle zone lymphoma, low grade follicular lymphoma, multiple myeloma (MM), chronic lymphocytic leukemia (CLL), diffuse large B-cell lymphoma (DLBCL), myelodysplastic syndrome (MDS), acute T cell leukemia, acute myeloid leukemia (AML), acute promyelocytic leukemia, acute myeloblastic leukemia, acute megakaryoblastic leukemia, precursor B acute lymphoblastic leukemia, precursor T acute lymphoblastic leukemia, Burkitt's leukemia (Burkitt's lymphoma), acute biphenotypic leukemia, chronic myeloid lymphoma, chronic myelogenous leukemia (CML), and chronic monocytic leukemia. In a specific embodiment, the disease or disorder is myelodysplastic syndromes (MDS). In another specific embodiment, the disease or disorder is acute myeloid leukemia (AML). In another specific embodiment, the disease or disorder is chronic lymphocytic leukemia (CLL). In yet another specific embodiment, the disease or disorder is multiple myeloma (MM).

[0330] In other embodiments, the disease or disorder is a solid tumor cancer. In some embodiments, the solid tumor cancer is selected from a group consisting of a carcinoma, an adenocarcinoma, an adrenocortical carcinoma, a colon adenocarcinoma, a colorectal adenocarcinoma, a colorectal carcinoma, a ductal cell carcinoma, a lung carcinoma, a thyroid carcinoma, a nasopharyngeal carcinoma, a melanoma, a non-melanoma skin carcinoma, a liver cancer and a lung cancer.

[0331] In some embodiments, the disease or disorder is caused by a pathogen. In some embodiments, the pathogen causes an infectious disease. In some embodiments, the pathogen is a bacteria. In some embodiments, the pathogen is a parasite. In some embodiments, the pathogen is a virus.

[0332] In other embodiments, the disease or disorder is an immune or autoimmune disorder. In some embodiments, the disease or disorder is an inflammatory disease. Inflammation plays a fundamental role in host defenses and the progression of immune-mediated diseases. The inflammatory response is initiated in response to injury (e.g., trauma, ischemia, and foreign particles) and infection (e.g., bacterial or viral infection) by a complex cascade of events, including chemical mediators (e.g., cytokines and prostaglandins) and inflammatory cells (e.g., leukocytes). The inflammatory response is characterized by increased blood flow, increased capillary permeability, and the influx of phagocytic cells. These events result in swelling, redness, warmth (altered heat patterns), and pus formation at the site of injury or infection.

[0333] Methods for administration of cells for adoptive cell therapy are known, as described, e.g., in US Patent Application Publication No. 2003/0170238; U.S. Pat. No. 4,690,915; Rosenberg, Nat Rev Clin Oncol. 8 (10):577-85 (2011); Themeli et al., Nat Biotechnol. 31(10): 928-933 (2013); Tsukahara et al., Biochem Biophys Res Commun 438(1): 84-9 (2013); and Davila et al., PLoS ONE 8(4): e61338 (2013). These methods may be used in connection with the methods and compositions provided herein.

[0334] In some embodiments, the cell therapy (e.g., adoptive T cell therapy) is carried out by autologous transfer, in which the cells are isolated and/or otherwise prepared from the subject who is to receive the cell therapy, or from a sample derived from such a subject. Thus, in some aspects, the cells are derived from a subject in need of a treatment and the cells, following isolation and processing are administered to the same subject. In other embodiments, the cell therapy (e.g., adoptive T cell therapy) is carried out by allogeneic transfer, in which the cells are isolated and/or otherwise prepared from a subject other than a subject who is to receive or who ultimately receives the cell therapy, e.g., a first subject. In such embodiments, the cells then are administered to a different subject, e.g., a second subject, of the same species. In some embodiments, the first and second subjects are genetically identical. In some embodiments, the first and second subjects are genetically similar. In some embodiments, the second subject expresses the same HLA class or supertype as the first subject.

[0335] In some embodiments, the subject, to whom the cells, cell populations, or compositions are administered is a primate, such as a human. The subject can be male or female and can be any suitable age, including infant, juvenile, adolescent, adult, and geriatric subjects. In some embodiments, the subject is a validated animal model for disease, adoptive cell therapy, and/or for assessing toxic outcomes.

[0336] The composition provided herein can be administered by any suitable means, for example, by injection, e.g., intravenous or subcutaneous injections. In some embodiments, they are administered by parenteral, intrapulmonary, and intranasal, and, if desired for local treatment, intralesional administration.

[0337] The amount of a prophylactic or therapeutic agent provided herein that will be effective in the prevention and/or treatment of a disease or condition can be determined by standard clinical techniques. Effective doses may be extrapolated from dose-response curves derived from in vitro or animal model test systems. For the prevention or treatment of disease, the appropriate dosage of the binding molecule or cell may depend on the type of disease or disorder to be treated, the type of binding molecule, the severity and course of the disease or disorder, whether the therapeutic agent is administered for preventive or therapeutic purposes, previous therapy, the patient's clinical history and response to the agent, and the discretion of the attending physician. The compositions, molecules and cells are in some embodiments suitably administered to the patient at one time or over a series of treatments. Multiple doses may be administered intermittently. An initial higher loading dose, followed by one or more lower doses may be administered.

[0338] In the context of genetically engineered cells, in some embodiments, a subject may be administered the range of about one million to about 100 billion cells and/or that amount of cells per kilogram of body weight. In some embodiments, wherein the pharmaceutical composition comprises any one of the engineered immune cells described herein, the pharmaceutical composition is administered at a dosage of at least about any of 10⁴, 10⁵, 10⁶, 107, 10⁸, or 10⁹ cells/kg of body weight of the individual. Dosages may vary depending on attributes particular to the disease or disorder and/or patient and/or other treatments.

[0339] In some embodiments, the pharmaceutical composition is administered for a single time. In some embodiments, the pharmaceutical composition is administered for multiple times (such as any of 2, 3, 4, 5, 6, or more times). In some embodiments, the pharmaceutical composition is administered once or multiple times during a dosing cycle. A dosing cycle can be, e.g., 1, 2, 3, 4, 5 or more week(s), or 1, 2, 3, 4, 5, or more month(s). The optimal dosage and treatment regime for a particular patient can be determined by one skilled in the art of medicine by monitoring the patient for signs of disease and adjusting the treatment accordingly.

[0340] In some embodiments, the compositions provided herein are administered as part of a combination treatment, such as simultaneously with or sequentially with, in any order, another therapeutic intervention, such as another antibody or engineered cell or receptor or agent, such as a cytotoxic or therapeutic agent.

[0341] In certain embodiments, once the cells are administered to a mammal (e.g., a human), the biological activity of the engineered cell populations is measured by any of a number of known methods. Parameters to assess include specific binding of an engineered or natural T cell or other immune cell to antigen, in vivo, e.g., by imaging, or ex vivo, e.g., by ELISA or flow cytometry. In certain embodiments, the ability of the engineered cells to destroy target cells can be measured using any suitable method known in the art, such as cytotoxicity assays described in, for example, Kochenderfer et al., J. Immunotherapy, 32(7): 689-702 (2009), and Herman et al. J. Immunological Methods, 285(1): 25-40 (2004). In certain embodiments, the biological activity of the cells also can be measured by assaying expression and/or secretion of certain cytokines, such as CD107a, IFNγ, IL-2, and TNF. In some aspects the biological activity is measured by assessing clinical outcome, such as reduction in tumor burden or load. 5.9. Kits and Articles of Manufacture

[0342] Further provided are kits, unit dosages, and articles of manufacture comprising any of the engineered immune effector cells described herein. In some embodiments, a kit is provided which contains any one of the pharmaceutical compositions described herein and preferably provides instructions for its use.

[0343] The kits of the present application are in suitable packaging. Suitable packaging includes, but is not limited to, vials, bottles, jars, flexible packaging (e.g., sealed Mylar or plastic bags), and the like. Kits may optionally provide additional components such as buffers and interpretative information. The present application thus also provides articles of manufacture, which include vials (such as sealed vials), bottles, jars, flexible packaging, and the like.

[0344] The article of manufacture can comprise a container and a label or package insert on or associated with the container. Suitable containers include, for example, bottles, vials, syringes, etc. The containers may be formed from a variety of materials such as glass or plastic. Generally, the container holds a composition which is effective for treating a disease or disorder (such as cancer) described herein, and may have a sterile access port (for example the container may be an intravenous solution bag or a vial having a stopper pierceable by a hypodermic injection needle). The label or package insert indicates that the composition is used for treating the particular condition in an individual. The label or package insert will further comprise instructions for administering the composition to the individual. The label may indicate directions for reconstitution and/or use. The container holding the pharmaceutical composition may be a multi-use vial, which allows for repeat administrations (e.g. from 2-6 administrations) of the reconstituted formulation. Package insert refers to instructions customarily included in commercial packages of therapeutic products that contain information about the indications, usage, dosage, administration, contraindications and/or warnings concerning the use of such therapeutic products. Additionally, the article of manufacture may further comprise a second container comprising a pharmaceutically-acceptable buffer, such as bacteriostatic water for injection (BWFI), phosphate-buffered saline, Ringer's solution and dextrose solution. It may further include other materials desirable from a commercial and user standpoint, including other buffers, diluents, filters, needles, and syringes.

[0345] The kits or article of manufacture may include multiple unit doses of the pharmaceutical composition and instructions for use, packaged in quantities sufficient for storage and use in pharmacies, for example, hospital pharmacies and compounding pharmacies.

[0346] The disclosure is generally disclosed herein using affirmative language to describe the numerous embodiments. The disclosure also specifically includes embodiments in which particular subject matter is excluded, in full or in part, such as substances or materials, method steps and conditions, protocols, procedures, assays or analysis. Thus, even though the disclosure is generally not expressed herein in terms of what the disclosure does not include, aspects that are not expressly included in the disclosure are nevertheless disclosed herein.

[0347] A number of embodiments of the disclosure have been described. Nevertheless, it will be understood that various modifications may be made without departing from the spirit and scope of the disclosure. Accordingly, the following examples are intended to illustrate but not limit the scope of disclosure described in the claims.

### 6. EXAMPLES

[0348] The following is a description of various methods and materials used in the studies, and are put forth so as to provide those of ordinary skill in the art with a complete disclosure and description of how to make and use the present disclosure, and are not intended to limit the scope of what the inventors regard as their disclosure nor are they intended to represent that the experiments below were performed and are all of the experiments that may be performed. It is to be understood that exemplary descriptions written in the present tense were not necessarily performed, but rather that the descriptions can be performed to generate the data and the like associated with the teachings of the present disclosure. Efforts have been made to ensure accuracy with respect to numbers used (e.g., amounts, percentages, etc.), but some experimental errors and deviations should be accounted for.

### 6.1. Example 1—Plasmid Construction, Virus Preparation, Titer Evaluation

[0349] CART cells armored with different chimeric cytokine receptors were designed as shown in FIGS. 1A-1B, 2A-2B, and 3A-3B and SEQ ID NOs: 30-134, 136-140, 142, 144, 146, 148, 150 and 151. To generate viral particles comprising polynucleic acids encoding any of the systems disclosed herein lentivirus packaging plasmid mixture including pMDLg/pRRE (Addgene #11251), pRSV-Rev (Addgene #11253), and pMD2.G (Addgene #11259) were pre-mixed with a PLVX-EF1A (including target system) vector at a pre-optimized ratio with polyetherimide (PEI), and incubated at room temperature for 5 minutes. The transfection mix was added dropwise to 293-T cells and mixed gently. Transfected 293-T cells were incubated overnight at 37° C. and 5% CO₂. Twenty-four hours post-transfection, supernatants were collected and centrifuged at 4° C., 500 g for 10 min to remove any cellular debris. Centrifuged supernatants were filtered through a 0.45 m PES filter to concentrate the viral supernatants post ultracentrifugation. After centrifugation, the supernatants were carefully discarded and the virus pellets were rinsed with pre-chilled DPBS. The concentration of virus was measured. Virus was aliquoted and stored at −80° C. Viral titers were determined by functional transduction on a T cell line.

[0350] Briefly, the lentiviral vector was modified using pLVX-Puro (Clontech #632164) by replacing the original promoter with human elongation factor 1α promoter (hEF1α) and by removing the puromycin resistance gene with EcoRI and BamHI by GenScript. PLVX-EF1A was further subjected to the lentivirus packaging procedure as described above.

### 6.2. Example 2—T Cell Transduction and FACS Analysis of Transduced T Cells

[0351] γδ T cells or αβT cells were prepared by addition of 5 μM Zoledronate and 1000 IU/mL IL-2 to PBMCs and cultured for 14 days with periodical change of media supplemented with 1000 IU/mL IL-2. Alternatively, 76 T cells or αβT cells were isolated from PBMC or umbilical cord blood (UCB) and then stimulated by anti-γδ TCR antibody or anti-a TCR antibody and anti-CD3 (OKT3) followed by co-incubation of K562-based artificial antigen-presenting cells (aAPCs) at an 1:2 ratio for at least 10 days.

[0352] PBMCs were isolated by density centrifugation (lymphoprep) from leukapheresis material and cryopreserved. PBMCs were resuscitated and activated with zoledronic acid (5 μM) in cell culture media AIM-V supplemented with IL-2 (1000 IU/ml) and 5% human AB serum and kept in a humidified chamber (37° C., 5% CO₂). Forty-eight hours post-activation, cells were transduced with lentiviral vectors encoding the system of Example 1 at an MOI of 5 with 5 pg/ml polybrene. Such transduction procedure was repeated the next day followed by replenishment of fresh media containing IL-2 (1000 IU/ml) the second day after the transduction. Cells were cultured in AIM-V supplemented with IL-2 (1000 IU/ml) in a humidified chamber with periodical change of media as determined by the pH of the culture media for further expansion. Cells were harvested 10 days post-transduction and the total number, purity and transduction efficiency was determined. Cells were further enriched with a negative TCRγ/δ+ T cell or TCRαβ+ T cell isolation kit (Miltenyi Biotec) before future applications or cryopreserved.

### 6.3. Example 3—Quantification of Transgene Expression

[0353] On day 3 and onwards (typically day 3, 7 and 14) post transduction, cells were evaluated for expression of the system of Example 1 by flow cytometry. An aliquot of cells was collected from the culture before washed, pelleted, and resuspended in diluted antibodies (eBioscience) at a dilution factor of 100 in PBS+0.5% FBS−50-100 μl per sample. Resuspended cells were resuspended in about 50 to 100 μl of solution. Cell were incubated at 4° C. for 30 minutes. Viability dye eFluor780 or SYTOX Blue viability stain was also added according to manufacturer's instructions. Post-incubation, cells were washed twice in PBS and resuspended in 100 to 200 μl PBS for analysis. The mean fluorescence of the system was quantified by flow cytometry.

[0354] As shown in FIGS. 35 and 36, compared to anti-GPC3 CAR αβT cells, NKG2D CAR T cells have poor proliferation and viability during culture because of suicide or fratricide.

[0355] For anti-GPC3 CAR-T staining, cells were stained with PE anti-DYKDDDDK Tag Antibody (Biolegend). Flow cytometry analysis for all experiments was performed by using FlowJo (Tree Star, Inc.).

[0356] The positive rates of virus infected T cells expressing different CAR or with armor were shown in Table 1.

TABLE 1
Transfection efficiency of exemplary anti-GPC3 CAR T cells

| | Positive rate of T |
|---|---|
| Construct | cells transfection |
| BM CAR (γδT cells) | 50.3% |
| BM NKG2D-IL-7Rα--IL12Rβ2 (γδT cells) | 37.3% |

### 6.4. Example 4—Quantification of Ligands Expression on Tumor Cell Lines

[0357] Ligand surface expression of NKG2D on HCC cell lines huh7 was determined. Huh7 cells were stained with anti-MIC A/B antibody (Biolegend), anti-ULBP-1 antibody (R&D), anti-ULBP-3 antibody (R&D), anti-ULBP-2,5,6 antibody (R&D) or anti-CD155 antibody (Biolegend).

[0358] As shown in FIG. 4, huh7 cells moderately expressed NKG2D ligands, MIC A/B, ULBP-2, 5, 6.

### 6.5. Example 5—In Vitro Cytotoxicity Assay

[0359] For quick evaluation of anti-tumor activities of CAR-T cells (76 T cells or αβT cells) in vitro, FACS assay for cytotoxicity was performed. On day 8 after transduction, transduced T cells were harvested and co-incubated with target cells (GPC3⁺ HCC cell line: Huh7 and PLC-PRF-5, GPC3-HCC cell line: SK-HEP-1) at an E/T ratio (Effector: CAR-T/Target: Huh7, PLC-PRF-5 or SK-HEP-1) of 3:1, 1:1 or 0.3:1 for 16 hours. The target cells were pre-stained for CFSE. Un-transduced T cells (UNT) from the same batch were used as a negative control. The mixed cells were harvested and stained for 7-ADD. The cytotoxicity was calculated by the equation below: 7AAD+(E+T): the 7-ADD % in E/T co-incubation, 7AAD+(T): the 7-ADD % in target only. All anti-GPC3 CAR T cells (γδ T cells or αβT cells) show strong and comparable cytotoxicity against huh7 cells. Cytoxocity is calculated as: Cytotoxicity %=(7AAD+(E+T)−7AAD+(T))/(1−7AAD+(T))×100.

### 6.6. Example 6—IFN-γ, GM-CSF and TNF-α Secretion Detected by HTRF

[0360] In order to measure effector T-cell activation and proliferation, the production of effector cytokines such as IFN-γ, GM-CSF and TNF-α was measured. Supernatant from the in vitro cytotoxicity assay was collected to assess CAR-induced cytokine release. HTRF assays for IFN-7 (Cisbio, Cat #62HIFNGPEH), GM-CSF (Cisbio, Cat #62HGMCSFPEH) and TNFα (Cisbio, Cat #62HTNFAPEH) were performed according to the manufacturer's manual.

[0361] All anti-GPC3 CART cells (γδ T cells or αβT cells) exhibit potent killing activity against huh7 cells, and release IFN-γ, GM-CSF and TNF-α in response to huh7 cells. CAR T cells (γδ T cells or αβT cells) armored with NKG2D chimeric cytokine receptors showed similar level of TNF-α, IFN-γ and GM-CSF secretion as naked CAR T cells.

### 6.7. Example 7—Long-Term Cytotoxicity Assay

[0362] To evaluate the long-term killing efficacy of CAR T cells (γδ T cells or αβT cell), long-term co-culture assays were performed, which mimic the dynamic killing process in vivo. Transduced or non-transduced T cells (1×10⁵/well) were co-cultured with tumor cell lines (huh7, Raji or U937 cells, 1×10⁵/well) at an E:T ratio of 1:1 in 24-well plates, in the absence of exogenous cytokines (IL-2). Part of the cells were harvested and stained for CD3 after 2 or 3 days' co-culture. For serial co-culture assays, the remaining T cells were then re-challenged with fresh huh7 cells at the same E:T ratio. Co-cultures were carried on until tumor cells outgrew. The T cell proliferation rate at each time point was calculated by dividing the number of T cells at the time point by the number of T cells at the initial time point.

[0363] Long-term cytotoxicity of NKG2D chimeric single or two cytokine receptors armored BM CAR γδT cells or αβT cells by FACS detection are shown in FIGS. 5, 7, 9, 11, 13 and 15. Calculated T cells proliferation from the same experiment are shown in FIGS. 6, 8, 10, 12, 14 and 16. The data indicated that NKG2D chimeric cytokine receptors armors improved BM CAR T cells cytotoxicity and proliferation.

[0364] Long-term cytotoxicity of truncated NKG2D chimeric two cytokine receptors armored BM CAR αβT cells by FACS detection are shown in FIG. 17. Calculated T cells proliferation from the same experiment are shown in FIG. 18. The data indicated that truncated NKG2D chimeric cytokine receptors armors improved BM CAR T cells cytotoxicity and proliferation.

[0365] Long-term cytotoxicity of anti-MIC-A/B scFv chimeric two cytokine receptors armored BM CAR γδT cells by FACS detection are shown in FIG. 19. Calculated T cells proliferation from the same experiment are shown in FIG. 20. The data indicated that anti-MIC-A/B scFv chimeric cytokine receptors armors improved BM CAR T cells cytotoxicity and proliferation.

[0366] Long-term cytotoxicity of NKG2D chimeric two cytokine receptors armored construct 185 CAR αβT cells (an anti-GPC3 CAR αβT cells) by FACS detection are shown in FIG. 22. Calculated T cells proliferation from the same experiment are shown in FIG. 23. The data indicated that NKG2D chimeric two cytokine receptors armors improved construct 185 CAR CAR T cells cytotoxicity and proliferation.

[0367] Long-term cytotoxicity of NKG2D chimeric two cytokine receptors armored CTL-019 CAR (an anti-CD19 CAR) 76T cells or αβT cells by FACS detection are shown in FIGS. 24 and 26. Calculated T cells proliferation from the same experiment are shown in FIGS. 25 and 27. The data indicated that NKG2D chimeric cytokine receptors armors improved CTL-019 CAR T cells cytotoxicity and proliferation.

[0368] Long-term cytotoxicity of NKG2D chimeric two cytokine receptors armored AS67190 CAR αβT cells (an anti-CD33 CAR αβT cells) by FACS detection are shown in FIG. 28. Calculated T cells proliferation from the same experiment are shown in FIG. 29. The data indicated that NKG2D chimeric two cytokine receptors armors improved AS67190 CAR CAR T cells cytotoxicity and proliferation.

[0369] Long-term cytotoxicity of TIGIT chimeric two cytokine receptors armored BM CAR γδT cells by FACS detection are shown in FIG. 30. Calculated T cells proliferation from the same experiment are shown in FIG. 31. The data indicated that TIGIT chimeric cytokine receptors armors improved BM CAR T cells cytotoxicity and proliferation.

[0370] Long-term cytotoxicity of SIRP-α chimeric two cytokine receptors armored AS67190 CAR γδT cells by FACS detection are shown in FIG. 33. Calculated T cells proliferation from the same experiment are shown in FIG. 34. The data indicated that SIRP-α chimeric cytokine receptors armors improved AS67190 CAR T cells cytotoxicity and proliferation.

[0371] Long-term cytotoxicity of depleted NKG2D or constitutively active chimeric two cytokine receptors armored BM CAR αβT cells by FACS detection are shown in FIG. 37. Calculated T cells proliferation from the same experiment are shown in FIG. 38. The data indicated that NKG2D is significantly important to chimeric cytokine receptors armors.

### 6.8. Example 8—In Vivo Safety and Efficacy Evaluation

[0372] Anti-tumor activity of an exemplary anti-GPC3 CAR-T cells (γδ T cells or αβT cells) was assessed in vivo in a huh7 xenograft model. Briefly, 3 million (3×10⁶) huh7 cells were implanted subcutaneously on day 0 in NOD/SCID IL-2RγC null (NSG) mice. Ten days after tumor inoculation, mice were treated with intravenous injection of 1×10⁶ armored CAR-76 T or mock T cells or phosphate-buffered saline (PBS). Tumor dimensions were measured with calipers twice a week, and tumor volumes were calculated using the formula V=1/2(length×width2). Mice were euthanized when the mean tumor burden in the control mice reached 2,000 mm³. In addition, T cell proliferation was monitored via FACS analysis from plasma drawn from blood.

[0373] For toxicity evaluations, clinical symptoms were observed every day, while the animals' body weights. Blood (0.2 mL) were taken every week for detecting the humanized cytokine profiles (GM-CSF, IFN-γ and TNF-α) in mice.

[0374] The results of anti-tumor effect of anti-GPC3 CAR γδT cells or anti-GPC3 CAR armored with NKG2D chimeric two cytokine receptors γδT cells in huh7 xenograft model were shown in FIG. 21. Unarmored CAR-76 T cells, alongside chimeric cytokine receptors armored CAR-γδ T cells inhibited tumor growth. Specifically, unarmored CAR-γδ T cells-treated mice reached tumor free but slowly repulsed, while NKG2D chimeric two cytokine receptors armored CAR-γδ T cells-treated mice reached tumor-free and remained healthy and tumor-free till the end of experimental observations.

[0375] The result of anti-tumor effect of anti-GPC3 CAR γδT cells or anti-GPC3 CAR armored with TIGIT chimeriytokine receptors γδT cells in huh7 xenograft model was shown in FIG. 32. Unarmored CAR-γδ T cells, alongside chimeric cytokine receptors armored CAR-γδ T cells inhibited tumor growth. Specifically, unarmored CAR-γδ T cells-treated mice were slightly inhibited, while TIGIT chimeric two cytokine receptors armored CAR-γδ T cells-treated mice reached tumor-free.

[0376] In summary, chimeric cytokine receptors armored CAR-γδ T cells were demonstrated efficacious and safe in treating tumors as shown in the in vitro efficacy, in vivo efficacy, and safety tests.

[0377] From the foregoing, it will be appreciated that, although specific embodiments have been described herein for the purpose of illustration, various modifications may be made without deviating from the spirit and scope of what is provided herein. All of the references referred to above are incorporated herein by reference in their entireties.

SEQUENCE LISTING

SEQ ID NO: 1 (CD8α signal peptide amino acid sequence)
MALPVTALLLPLALLLHAARP
SEQ ID NO: 2 (GM-CSF signal peptide amino acid sequence)
MWLQSLLLLGTVACSIS
SEQ ID NO: 3 (IL-15 signal peptide amino acid sequence)
MRISKPHLRSISIQCYLCLLLNSHFLTEA
SEQ ID NO: 4 (FLAG tag amino acid sequence)
DYKDDDDK
SEQ ID NO: 5 (HA tag amino acid sequence)
YPYDVPDYA
SEQ ID NO: 6 (NKG2D 81-216 amino acid sequence)
SLFNQEVQIPLTESYCGPCPKNWICYKNNCYQFFDESKNWYESQASCMSQNASLLKVYS
KEDQDLLKLVKSYHWMGLVHIPTNGSWQWEDGSILSPNLLTIIEMQKGDCALYASSFKG
YIENCSTPNTYICMQRTV
SEQ ID NO: 7 (TpoR 478-582 amino acid sequence)
SDPTRVETATETAWISLVTALHLVLGLSAVLGLLLLRWQFPAHYRRLRHALWPSLPDLHRV
LGQYLRDTAALSPPKATVSDTCEEVEPSLLEILPKSSERTPLPL
SEQ ID NO: 8 (IL7Ra 316-459 amino acid sequence)
ARDEVEGFLQDTFPQQLEESEKQRLGGDVQSPNCPSEDVVITPESFGRDSSLTCLAGNVS
ACDAPILSSSRSLDCRESGKNGPHVYQDLLLSLGTTNSTLPPPFSLQSGILTLNPVAQGQPI
LTSLGSNQEEAYVTMSSFYQNQ
SEQ ID NO: 9 (IL9R-1 310-464 amino acid sequence)
MFFQPLYSVHNGNFQTWMGAHGAGVLLSQDCAGTPQGALEPCVQEATALLTCGPARPW
KSVALEEEQEGPGTRLPGNLSSEDVLPAGCTEWRVQTLAYLPQEDWAPTSLTRPAPPDSE
GSRSSSSSSSSNNNNYCALGCYGGWHLSALPGNTQSS
SEQ ID NO: 10 (IL9R-2 391-464 amino acid sequence)
DVLPAGCTEWRVQTLAYLPQEDWAPTSLTRPAPPDSEGSRSSSSSSSSNNNNYCALGCYG
GWHLSALPGNTQSS
SEQ ID NO: 11 (IL9R-3 310-337, 391-464 amino acid sequence)
MFFQPLYSVHNGNFQTWMGAHGAGVLLSDVLPAGCTEWRVQTLAYLPQEDWAPTSLTR
PAPPDSEGSRSSSSSSSSNNNNYCALGCYGGWHLSALPGNTQSS
SEQ ID NO: 12 (IL12Rβ1 612-662 amino acid sequence)
SLQEALVVEMSWDKGERTEPLEKTELPEGAPELALDTELSLEDGDRCKAKM
SEQ ID NO: 13 (IL12Rβ2 775-825 amino acid sequence)
SDPKPENPACPWTVLPAGDLPTHDGYLPSNIDDLPSHEAPLADSLEELEPQ
SEQ ID NO: 14 (IL15Rα 229-267 amino acid sequence)
KSRQTPPLASVEMEAMEALPVTWGTSSRDEDLENCSHHL
SEQ ID NO: 15 (IL15Rβ-1 333-551 amino acid sequence)
VTQLLLQQDKVPEPASLSSNHSLTSCFTNQGYFFFHLPDALEIEACQVYFTYDPYSEEDPD
EGVAGAPTGSSPQPLQPLSGEDDAYCTFPSRDDLLLFSPSLLGGPSPPSTAPGGSGAGEER
MPPSLQERVPRDWDPQPLGPPTPGVPDLVDFQPPPELVLREAGEEVPDAGPREGVSFPWS
RPPGQGEFRALNARLPLNTDAYLSLQELQGQDPTHLV
SEQ ID NO: 16 (IL15Rβ-2 345-431, 521-551 amino acid sequence)
EPASLSSNHSLTSCFTNQGYFFFHLPDALEIEACQVYFTYDPYSEEDPDEGVAGAPTGSSP
QPLQPLSGEDDAYCTFPSRDDLLLFSEFRALNARLPLNTDAYLSLQELQGQDPTHLV
SEQ ID NO: 17 (IL15Rβ-3 401-431, 521-551 amino acid sequence)
TGSSPQPLQPLSGEDDAYCTFPSRDDLLLFSEFRALNARLPLNTDAYLSLQELQGQDPTHL
V
SEQ ID NO: 18 (IL-18Rα 361-530 amino acid sequence)
HLTRRDETLTDGKTYDAFVSYLKECRPENGEEHTFAVEILPRVLEKHFGYKLCIFERDVVP
GGAVVDEIHSLIEKSRRLIIVLSKSYMSNEVRYELESGLHEALVERKIKIILIEFTPVTDFTFL
PQSLKLLKSHRVLKWKADKSLSYNSRFWKNLLYLMPAKTVKPGRD
SEQ ID NO: 19 (IL-18Rβ 391-570 amino acid sequence)
LYRHWIEIVLLYRTYQSKDQTLGDKKDFDAFVSYAKWSSFPSEATSSLSEEHLALSLFPDV
LENKYGYSLCLLERDVAPGGVYAEDIVSIIKRSRRGIFILSPNYVNGPSIFELQAAVNLALD
DQTLKLILIKFCYFQEPESLPHLVKKALRVLPTVTWRGLKSVPPNSRFWAKMRYHMPVK
NSQGFTWN
SEQ ID NO: 20 (IL-21R-1 301-411 amino acid sequence)
LELGPWSPEVPSTLEVYSCHPPRSPAKRLQLTELQEPAELVESDGVPKPSFWPTAQNSGG
SAYSEERDRPYGLVSIDTVTVLDAEGPCTWPCSCEDDGYPALDLDAGLEPS
SEQ ID NO: 21 (IL-21R-2 504-538 amino acid sequence)
ECDFTSPGDEGPPRSYLRQWVVIPPPLSSPGPQAS
SEQ ID NO: 22 (IL-21R-3 301-411, 504-538 amino acid sequence)
LELGPWSPEVPSTLEVYSCHPPRSPAKRLQLTELQEPAELVESDGVPKPSFWPTAQNSGG
SAYSEERDRPYGLVSIDTVTVLDAEGPCTWPCSCEDDGYPALDLDAGLEPSECDFTSPGD
EGPPRSYLRQWVVIPPPLSSPGPQAS
SEQ ID NO: 23 (IL-23R-1 381-500 amino acid sequence)
RTGIKRRILLLIPKWLYEDIPNMKNSNVVKMLQENSELMNNNSSEQVLYVDPMITEIKEIF
IPEHKPTDYKKENTGPLETRDYPQNSLFDNTTVVYIPDLNTGYKPQISNFLPEGSHLSN
SEQ ID NO: 24 (IL-23R-2 593-625 amino acid sequence)
EFVSCLGIVNEELPSINTYFPQNILESHENRIS
SEQ ID NO: 25 (IL-23R-3 381-500, 593-625 amino acid sequence)
RTGIKRRILLLIPKWLYEDIPNMKNSNVVKMLQENSELMNNNSSEQVLYVDPMITEIKEIF
IPEHKPTDYKKENTGPLETRDYPQNSLFDNTTVVYIPDLNTGYKPQISNFLPEGSHLSNEF
VSCLGIVNEELPSINTYFPQNILESHENRIS
SEQ ID NO: 26 (GM-CSFRα 371-400 amino acid sequence)
EVEDEIIWEEFTPEEGKGYREEVLTVKEIT
SEQ ID NO: 27 (GM-CSFRβ-1 701-729, 751-779, 809-838, 867-897 amino acid sequence)
DTEDPGVASGYVSSADLVFTPNSGASSVSGPPGAPGPVKSGFEGYVELPPIEGRSPRSQPE
GLLVLQQVGDYCFLPGLGPGPLSLRSKQVPVIQLFKALKQQDYLSLPPWEVNKPGEVC
SEQ ID NO: 28 (GM-CSFRβ-2 581-644, 701-729, 751-779, 809-838, 867-897 amino acid
sequence)
EKQASSFDFNGPYLGPPHSRSLPDILGQPEPPQEGGSQKSPPPGSLEYLCLPAGGQVQLVP
LAQDTEDPGVASGYVSSADLVFTPNSGASSVSGPPGAPGPVKSGFEGYVELPPIEGRSPRS
QPEGLLVLQQVGDYCFLPGLGPGPLSLRSKQVPVIQLFKALKQQDYLSLPPWEVNKPGE
VC
SEQ ID NO: 29 (BM CAR amino acid sequence)
MALPVTALLLPLALLLHAARPDVVMTQSPLSLPVTPGEPASISCRSSQSL VHSNANTYLH
WYLQKPGQSPQLLIYKVSNRFSGVPDRFSGSGSGTDFTLKISRVEAEDVGVYYCSQNTH
VPPTFGQGTKLEIKRGGGGSGGGGSGGGGSQVQLVQSGAEVKKPGASVKVSCKASGYT
FTDYEMHWVRQAPGQGLEWMGALDPKTGDTAYSQKFKGRVTLTADESTSTAYMELSS
LRSEDTAVYYCTRFYSYTYWGQGTLVTVSSTTTPAPRPPTPAPTIASQPLSLRPEACRPAA
GGAVHTRGLDFACDIYIWAPLAGTCGVLLLSLVITLYCKRGRKKLLYIFKQPFMRPVQTT
QEEDGCSCRFPEEEEGGCELRVKFSRSADAPAYKQGQNQLYNELNLGRREEYDVLDKR
RGRDPEMGGKPRRKNPQEGLYNELQKDKMAEAYSEIGMKGERRRGKGHDGLYQGLST
ATKDTYDALHMQALPPR
SEQ ID NO: 30 (BM NKG2D-IL7Rα-IL12Rβ2 amino acid sequence)
MALPVTALLLPLALLLHAARPDVVMTQSPLSLPVTPGEPASISCRSSQSLVHSNANTYLH
WYLQKPGQSPQLLIYKVSNRFSGVPDRFSGSGSGTDFTLKISRVEAEDVGVYYCSQNTH
VPPTFGQGTKLEIKRGGGGSGGGGSGGGGSQVQLVQSGAEVKKPGASVKVSCKASGYT
FTDYEMHWVRQAPGQGLEWMGALDPKTGDTAYSQKFKGRVTLTADESTSTAYMELSSL
RSEDTAVYYCTRFYSYTYWGQGTLVTVSSTTTPAPRPPTPAPTIASQPLSLRPEACRPAAG
GAVHTRGLDFACDIYIWAPLAGTCGVLLLSLVITLYCKRGRKKLLYIFKQPFMRPVQTTQE
EDGCSCRFPEEEEGGCELRVKFSRSADAPAYKQGQNQLYNELNLGRREEYDVLDKRRGR
DPEMGGKPRRKNPQEGLYNELQKDKMAEAYSEIGMKGERRRGKGHDGLYQGLSTATKD
TYDALHMQALPPRGSGATNFSLLKQAGDVEENPGPMALPVTALLLPLALLLHAARPSLF
NQEVQIPLTESYCGPCPKNWICYKNNCYQFFDESKNWYESQASCMSQNASLLKVYSKED
QDLLKLVKSYHWMGLVHIPTNGSWQWEDGSILSPNLLTIIEMQKGDCALYASSFKGYIEN
CSTPNTYICMQRTVSDPTRVETATETAWISLVTALHLVLGLSAVLGLLLLRWQFPAHYRRL
RHALWPSLPDLHRVLGQYLRDTAALSPPKATVSDTCEEVEPSLLEILPKSSERTPLPLARD
EVEGFLQDTFPQQLEESEKQRLGGDVQSPNCPSEDVVITPESFGRDSSLTCLAGNVSACD
APILSSSRSLDCRESGKNGPHVYQDLLLSLGTTNSTLPPPFSLQSGILTLNPVAQGQPILTSL
GSNQEEAYVTMSSFYQNQSDPKPENPACPWTVLPAGDLPTHDGYLPSNIDDLPSHEAPLA
DSLEELEPQ
SEQ ID NO: 31 (BM NKG2D-IL-7Rα amino acid sequence)
MALPVTALLLPLALLLHAARPDVVMTQSPLSLPVTPGEPASISCRSSQSLVHSNANTYLH
WYLQKPGQSPQLLIYKVSNRFSGVPDRFSGSGSGTDFTLKISRVEAEDVGVYYCSQNTH
VPPTFGQGTKLEIKRGGGGSGGGGSGGGGSQVQLVQSGAEVKKPGASVKVSCKASGYT
FTDYEMHWVRQAPGQGLEWMGALDPKTGDTAYSQKFKGRVTLTADESTSTAYMELSSL
RSEDTAVYYCTRFYSYTYWGQGTLVTVSSTTTPAPRPPTPAPTIASQPLSLRPEACRPAAG
GAVHTRGLDFACDIYIWAPLAGTCGVLLLSLVITLYCKRGRKKLLYIFKQPFMRPVQTTQE
EDGCSCRFPEEEEGGCELRVKFSRSADAPAYKQGQNQLYNELNLGRREEYDVLDKRRGR
DPEMGGKPRRKNPQEGLYNELQKDKMAEAYSEIGMKGERRRGKGHDGLYQGLSTATKD
TYDALHMQALPPRGSGATNFSLLKQAGDVEENPGPMALPVTALLLPLALLLHAARPSLF
NQEVQIPLTESYCGPCPKNWICYKNNCYQFFDESKNWYESQASCMSQNASLLKVYSKED
QDLLKLVKSYHWMGLVHIPTNGSWQWEDGSILSPNLLTIIEMQKGDCALYASSFKGYIEN
CSTPNTYICMQRTVSDPTRVETATETAWISLVTALHLVLGLSAVLGLLLLRWQFPAHYRRL
RHALWPSLPDLHRVLGQYLRDTAALSPPKATVSDTCEEVEPSLLEILPKSSERTPLPLARD
EVEGFLQDTFPQQLEESEKQRLGGDVQSPNCPSEDVVITPESFGRDSSLTCLAGNVSACD
APILSSSRSLDCRESGKNGPHVYQDLLLSLGTTNSTLPPPFSLQSGILTLNPVAQGQPILTSL
GSNQEEAYVTMSSFYQNQ
SEQ ID NO: 32 (BM NKG2D-IL12Rβ1 amino acid sequence)
MALPVTALLLPLALLLHAARPDVVMTQSPLSLPVTPGEPASISCRSSQSLVHSNANTYLH
WYLQKPGQSPQLLIYKVSNRFSGVPDRFSGSGSGTDFTLKISRVEAEDVGVYYCSQNTH
VPPTFGQGTKLEIKRGGGGSGGGGSGGGGSQVQLVQSGAEVKKPGASVKVSCKASGYT
FTDYEMHWVRQAPGQGLEWMGALDPKTGDTAYSQKFKGRVTLTADESTSTAYMELSSL
RSEDTAVYYCTRFYSYTYWGQGTLVTVSSTTTPAPRPPTPAPTIASQPLSLRPEACRPAAG
GAVHTRGLDFACDIYIWAPLAGTCGVLLLSLVITLYCKRGRKKLLYIFKQPFMRPVQTTQE
EDGCSCRFPEEEEGGCELRVKFSRSADAPAYKQGQNQLYNELNLGRREEYDVLDKRRGR
DPEMGGKPRRKNPQEGLYNELQKDKMAEAYSEIGMKGERRRGKGHDGLYQGLSTATKD
TYDALHMQALPPRGSGATNFSLLKQAGDVEENPGPMALPVTALLLPLALLLHAARPSLF
NQEVQIPLTESYCGPCPKNWICYKNNCYQFFDESKNWYESQASCMSQNASLLKVYSKED
QDLLKLVKSYHWMGLVHIPTNGSWQWEDGSILSPNLLTIIEMQKGDCALYASSFKGYIEN
CSTPNTYICMQRTVSDPTRVETATETAWISLVTALHLVLGLSAVLGLLLLRWQFPAHYRRL
RHALWPSLPDLHRVLGQYLRDTAALSPPKATVSDTCEEVEPSLLEILPKSSERTPLPLSLQE
ALVVEMSWDKGERTEPLEKTELPEGAPELALDTELSLEDGDRCKAKM
SEQ ID NO: 33 (BM NKG2D-IL-12Rβ2 amino acid sequence)
MALPVTALLLPLALLLHAARPDVVMTQSPLSLPVTPGEPASISCRSSQSLVHSNANTYLH
WYLQKPGQSPQLLIYKVSNRFSGVPDRFSGSGSGTDFTLKISRVEAEDVGVYYCSQNTH
VPPTFGQGTKLEIKRGGGGSGGGGSGGGGSQVQLVQSGAEVKKPGASVKVSCKASGYT
FTDYEMHWVRQAPGQGLEWMGALDPKTGDTAYSQKFKGRVTLTADESTSTAYMELSSL
RSEDTAVYYCTRFYSYTYWGQGTLVTVSSTTTPAPRPPTPAPTIASQPLSLRPEACRPAAG
GAVHTRGLDFACDIYIWAPLAGTCGVLLLSLVITLYCKRGRKKLLYIFKQPFMRPVQTTQE
EDGCSCRFPEEEEGGCELRVKFSRSADAPAYKQGQNQLYNELNLGRREEYDVLDKRRGR
DPEMGGKPRRKNPQEGLYNELQKDKMAEAYSEIGMKGERRRGKGHDGLYQGLSTATKD
TYDALHMQALPPRGSGATNFSLLKQAGDVEENPGPMALPVTALLLPLALLLHAARPSLF
NQEVQIPLTESYCGPCPKNWICYKNNCYQFFDESKNWYESQASCMSQNASLLKVYSKED
QDLLKLVKSYHWMGLVHIPTNGSWQWEDGSILSPNLLTIIEMQKGDCALYASSFKGYIEN
CSTPNTYICMQRTVSDPTRVETATETAWISLVTALHLVLGLSAVLGLLLLRWQFPAHYRRL
RHALWPSLPDLHRVLGQYLRDTAALSPPKATVSDTCEEVEPSLLEILPKSSERTPLPLSDPK
PENPACPWTVLPAGDLPTHDGYLPSNIDDLPSHEAPLADSLEELEPQ
SEQ ID NO: 34 (BM NKG2D-IL15Rα amino acid sequence)
MALPVTALLLPLALLLHAARPDVVMTQSPLSLPVTPGEPASISCRSSQSLVHSNANTYLH
WYLQKPGQSPQLLIYKVSNRFSGVPDRFSGSGSGTDFTLKISRVEAEDVGVYYCSQNTH
VPPTFGQGTKLEIKRGGGGSGGGGSGGGGSQVQLVQSGAEVKKPGASVKVSCKASGYT
FTDYEMHWVRQAPGQGLEWMGALDPKTGDTAYSQKFKGRVTLTADESTSTAYMELSSL
RSEDTAVYYCTRFYSYTYWGQGTLVTVSSTTTPAPRPPTPAPTIASQPLSLRPEACRPAAG
GAVHTRGLDFACDIYIWAPLAGTCGVLLLSLVITLYCKRGRKKLLYIFKQPFMRPVQTTQE
EDGCSCRFPEEEEGGCELRVKFSRSADAPAYKQGQNQLYNELNLGRREEYDVLDKRRGR
DPEMGGKPRRKNPQEGLYNELQKDKMAEAYSEIGMKGERRRGKGHDGLYQGLSTATKD
TYDALHMQALPPRGSGATNFSLLKQAGDVEENPGPMALPVTALLLPLALLLHAARPSLF
NQEVQIPLTESYCGPCPKNWICYKNNCYQFFDESKNWYESQASCMSQNASLLKVYSKED
QDLLKLVKSYHWMGLVHIPTNGSWQWEDGSILSPNLLTIIEMQKGDCALYASSFKGYIEN
CSTPNTYICMQRTVSDPTRVETATETAWISLVTALHLVLGLSAVLGLLLLRWQFPAHYRRL
RHALWPSLPDLHRVLGQYLRDTAALSPPKATVSDTCEEVEPSLLEILPKSSERTPLPLKSR
QTPPLASVEMEAMEALPVTWGTSSRDEDLENCSHHL
SEQ ID NO: 35 (BM NKG2D-IL15Rβ-1 amino acid sequence)
MALPVTALLLPLALLLHAARPDVVMTQSPLSLPVTPGEPASISCRSSQSLVHSNANTYLH
WYLQKPGQSPQLLIYKVSNRFSGVPDRFSGSGSGTDFTLKISRVEAEDVGVYYCSQNTH
VPPTFGQGTKLEIKRGGGGSGGGGSGGGGSQVQLVQSGAEVKKPGASVKVSCKASGYT
FTDYEMHWVRQAPGQGLEWMGALDPKTGDTAYSQKFKGRVTLTADESTSTAYMELSSL
RSEDTAVYYCTRFYSYTYWGQGTLVTVSSTTTPAPRPPTPAPTIASQPLSLRPEACRPAAG
GAVHTRGLDFACDIYIWAPLAGTCGVLLLSLVITLYCKRGRKKLLYIFKQPFMRPVQTTQE
EDGCSCRFPEEEEGGCELRVKFSRSADAPAYKQGQNQLYNELNLGRREEYDVLDKRRGR
DPEMGGKPRRKNPQEGLYNELQKDKMAEAYSEIGMKGERRRGKGHDGLYQGLSTATKD
TYDALHMQALPPRGSGATNFSLLKQAGDVEENPGPMALPVTALLLPLALLLHAARPSLF
NQEVQIPLTESYCGPCPKNWICYKNNCYQFFDESKNWYESQASCMSQNASLLKVYSKED
QDLLKLVKSYHWMGLVHIPTNGSWQWEDGSILSPNLLTIIEMQKGDCALYASSFKGYIEN
CSTPNTYICMQRTVSDPTRVETATETAWISLVTALHLVLGLSAVLGLLLLRWQFPAHYRRL
RHALWPSLPDLHRVLGQYLRDTAALSPPKATVSDTCEEVEPSLLEILPKSSERTPLPLVTQL
LLQQDKVPEPASLSSNHSLTSCFTNQGYFFFHLPDALEIEACQVYFTYDPYSEEDPDEGVA
GAPTGSSPQPLQPLSGEDDAYCTFPSRDDLLLFSPSLLGGPSPPSTAPGGSGAGEERMPPSL
QERVPRDWDPQPLGPPTPGVPDLVDFQPPPELVLREAGEEVPDAGPREGVSFPWSRPPGQ
GEFRALNARLPLNTDAYLSLQELQGQDPTHLV
SEQ ID NO: 36 (BM NKG2D-IL15Rβ-2 amino acid sequence)
MALPVTALLLPLALLLHAARPDVVMTQSPLSLPVTPGEPASISCRSSQSLVHSNANTYLH
WYLQKPGQSPQLLIYKVSNRFSGVPDRFSGSGSGTDFTLKISRVEAEDVGVYYCSQNTH
VPPTFGQGTKLEIKRGGGGSGGGGSGGGGSQVQLVQSGAEVKKPGASVKVSCKASGYT
FTDYEMHWVRQAPGQGLEWMGALDPKTGDTAYSQKFKGRVTLTADESTSTAYMELSSL
RSEDTAVYYCTRFYSYTYWGQGTLVTVSSTTTPAPRPPTPAPTIASQPLSLRPEACRPAAG
GAVHTRGLDFACDIYIWAPLAGTCGVLLLSLVITLYCKRGRKKLLYIFKQPFMRPVQTTQE
EDGCSCRFPEEEEGGCELRVKFSRSADAPAYKQGQNQLYNELNLGRREEYDVLDKRRGR
DPEMGGKPRRKNPQEGLYNELQKDKMAEAYSEIGMKGERRRGKGHDGLYQGLSTATKD
TYDALHMQALPPRGSGATNFSLLKQAGDVEENPGPMALPVTALLLPLALLLHAARPSLF
NQEVQIPLTESYCGPCPKNWICYKNNCYQFFDESKNWYESQASCMSQNASLLKVYSKED
QDLLKLVKSYHWMGLVHIPTNGSWQWEDGSILSPNLLTIIEMQKGDCALYASSFKGYIEN
CSTPNTYICMQRTVSDPTRVETATETAWISLVTALHLVLGLSAVLGLLLLRWQFPAHYRRL
RHALWPSLPDLHRVLGQYLRDTAALSPPKATVSDTCEEVEPSLLEILPKSSERTPLPLEPAS
LSSNHSLTSCFTNQGYFFFHLPDALEIEACQVYFTYDPYSEEDPDEGVAGAPTGSSPQPLQ
PLSGEDDAYCTFPSRDDLLLFSEFRALNARLPLNTDAYLSLQELQGQDPTHLV
SEQ ID NO: 37 (BM NKG2D-IL15Rβ-3 amino acid sequence)
MALPVTALLLPLALLLHAARPDVVMTQSPLSLPVTPGEPASISCRSSQSLVHSNANTYLH
WYLQKPGQSPQLLIYKVSNRFSGVPDRFSGSGSGTDFTLKISRVEAEDVGVYYCSQNTH
VPPTFGQGTKLEIKRGGGGSGGGGSGGGGSQVQLVQSGAEVKKPGASVKVSCKASGYT
FTDYEMHWVRQAPGQGLEWMGALDPKTGDTAYSQKFKGRVTLTADESTSTAYMELSSL
RSEDTAVYYCTRFYSYTYWGQGTLVTVSSTTTPAPRPPTPAPTIASQPLSLRPEACRPAAG
GAVHTRGLDFACDIYIWAPLAGTCGVLLLSLVITLYCKRGRKKLLYIFKQPFMRPVQTTQE
EDGCSCRFPEEEEGGCELRVKFSRSADAPAYKQGQNQLYNELNLGRREEYDVLDKRRGR
DPEMGGKPRRKNPQEGLYNELQKDKMAEAYSEIGMKGERRRGKGHDGLYQGLSTATKD
TYDALHMQALPPRGSGATNFSLLKQAGDVEENPGPMALPVTALLLPLALLLHAARPSLF
NQEVQIPLTESYCGPCPKNWICYKNNCYQFFDESKNWYESQASCMSQNASLLKVYSKED
QDLLKLVKSYHWMGLVHIPTNGSWQWEDGSILSPNLLTIIEMQKGDCALYASSFKGYIEN
CSTPNTYICMQRTVSDPTRVETATETAWISLVTALHLVLGLSAVLGLLLLRWQFPAHYRRL
RHALWPSLPDLHRVLGQYLRDTAALSPPKATVSDTCEEVEPSLLEILPKSSERTPLPLTGSS
PQPLQPLSGEDDAYCTFPSRDDLLLFSEFRALNARLPLNTDAYLSLQELQGQDPTHLV
SEQ ID NO: 38 (BM NKG2D-IL-18Rα amino acid sequence)
MALPVTALLLPLALLLHAARPDVVMTQSPLSLPVTPGEPASISCRSSQSLVHSNANTYLH
WYLQKPGQSPQLLIYKVSNRFSGVPDRFSGSGSGTDFTLKISRVEAEDVGVYYCSQNTH
VPPTFGQGTKLEIKRGGGGSGGGGSGGGGSQVQLVQSGAEVKKPGASVKVSCKASGYT
FTDYEMHWVRQAPGQGLEWMGALDPKTGDTAYSQKFKGRVTLTADESTSTAYMELSSL
RSEDTAVYYCTRFYSYTYWGQGTLVTVSSTTTPAPRPPTPAPTIASQPLSLRPEACRPAAG
GAVHTRGLDFACDIYIWAPLAGTCGVLLLSLVITLYCKRGRKKLLYIFKQPFMRPVQTTQE
EDGCSCRFPEEEEGGCELRVKFSRSADAPAYKQGQNQLYNELNLGRREEYDVLDKRRGR
DPEMGGKPRRKNPQEGLYNELQKDKMAEAYSEIGMKGERRRGKGHDGLYQGLSTATKD
TYDALHMQALPPRGSGATNFSLLKQAGDVEENPGPMALPVTALLLPLALLLHAARPSLF
NQEVQIPLTESYCGPCPKNWICYKNNCYQFFDESKNWYESQASCMSQNASLLKVYSKED
QDLLKLVKSYHWMGLVHIPTNGSWQWEDGSILSPNLLTIIEMQKGDCALYASSFKGYIEN
CSTPNTYICMQRTVSDPTRVETATETAWISLVTALHLVLGLSAVLGLLLLRWQFPAHYRRL
RHALWPSLPDLHRVLGQYLRDTAALSPPKATVSDTCEEVEPSLLEILPKSSERTPLPLHLTR
RDETLTDGKTYDAFVSYLKECRPENGEEHTFAVEILPRVLEKHFGYKLCIFERDVVPGGA
VVDEIHSLIEKSRRLIIVLSKSYMSNEVRYELESGLHEALVERKIKIILIEFTPVTDFTFLPQS
LKLLKSHRVLKWKADKSLSYNSRFWKNLLYLMPAKTVKPGRD
SEQ ID NO: 39 (BM NKG2D-IL-18Rβ amino acid sequence)
MALPVTALLLPLALLLHAARPDVVMTQSPLSLPVTPGEPASISCRSSQSLVHSNANTYLH
WYLQKPGQSPQLLIYKVSNRFSGVPDRFSGSGSGTDFTLKISRVEAEDVGVYYCSQNTH
VPPTFGQGTKLEIKRGGGGSGGGGSGGGGSQVQLVQSGAEVKKPGASVKVSCKASGYT
FTDYEMHWVRQAPGQGLEWMGALDPKTGDTAYSQKFKGRVTLTADESTSTAYMELSSL
RSEDTAVYYCTRFYSYTYWGQGTLVTVSSTTTPAPRPPTPAPTIASQPLSLRPEACRPAAG
GAVHTRGLDFACDIYIWAPLAGTCGVLLLSLVITLYCKRGRKKLLYIFKQPFMRPVQTTQE
EDGCSCRFPEEEEGGCELRVKFSRSADAPAYKQGQNQLYNELNLGRREEYDVLDKRRGR
DPEMGGKPRRKNPQEGLYNELQKDKMAEAYSEIGMKGERRRGKGHDGLYQGLSTATKD
TYDALHMQALPPRGSGATNFSLLKQAGDVEENPGPMALPVTALLLPLALLLHAARPSLF
NQEVQIPLTESYCGPCPKNWICYKNNCYQFFDESKNWYESQASCMSQNASLLKVYSKED
QDLLKLVKSYHWMGLVHIPTNGSWQWEDGSILSPNLLTIIEMQKGDCALYASSFKGYIEN
CSTPNTYICMQRTVSDPTRVETATETAWISLVTALHLVLGLSAVLGLLLLRWQFPAHYRRL
RHALWPSLPDLHRVLGQYLRDTAALSPPKATVSDTCEEVEPSLLEILPKSSERTPLPLLYR
HWIEIVLLYRTYQSKDQTLGDKKDFDAFVSYAKWSSFPSEATSSLSEEHLALSLFPDVLEN
KYGYSLCLLERDVAPGGVYAEDIVSIIKRSRRGIFILSPNYVNGPSIFELQAAVNLALDDQT
LKLILIKFCYFQEPESLPHLVKKALRVLPTVTWRGLKSVPPNSRFWAKMRYHMPVKNSQ
GFTWN
SEQ ID NO: 40 (BM NKG2D-IL-21R-1 amino acid sequence)
MALPVTALLLPLALLLHAARPDVVMTQSPLSLPVTPGEPASISCRSSQSLVHSNANTYLH
WYLQKPGQSPQLLIYKVSNRFSGVPDRFSGSGSGTDFTLKISRVEAEDVGVYYCSQNTH
VPPTFGQGTKLEIKRGGGGSGGGGSGGGGSQVQLVQSGAEVKKPGASVKVSCKASGYT
FTDYEMHWVRQAPGQGLEWMGALDPKTGDTAYSQKFKGRVTLTADESTSTAYMELSSL
RSEDTAVYYCTRFYSYTYWGQGTLVTVSSTTTPAPRPPTPAPTIASQPLSLRPEACRPAAG
GAVHTRGLDFACDIYIWAPLAGTCGVLLLSLVITLYCKRGRKKLLYIFKQPFMRPVQTTQE
EDGCSCRFPEEEEGGCELRVKFSRSADAPAYKQGQNQLYNELNLGRREEYDVLDKRRGR
DPEMGGKPRRKNPQEGLYNELQKDKMAEAYSEIGMKGERRRGKGHDGLYQGLSTATKD
TYDALHMQALPPRGSGATNFSLLKQAGDVEENPGPMALPVTALLLPLALLLHAARPSLF
NQEVQIPLTESYCGPCPKNWICYKNNCYQFFDESKNWYESQASCMSQNASLLKVYSKED
QDLLKLVKSYHWMGLVHIPTNGSWQWEDGSILSPNLLTIIEMQKGDCALYASSFKGYIEN
CSTPNTYICMQRTVSDPTRVETATETAWISLVTALHLVLGLSAVLGLLLLRWQFPAHYRRL
RHALWPSLPDLHRVLGQYLRDTAALSPPKATVSDTCEEVEPSLLEILPKSSERTPLPLLELG
PWSPEVPSTLEVYSCHPPRSPAKRLQLTELQEPAELVESDGVPKPSFWPTAQNSGGSAYSE
ERDRPYGLVSIDTVTVLDAEGPCTWPCSCEDDGYPALDLDAGLEPS
SEQ ID NO: 41 (BM NKG2D-IL-21R-2 amino acid sequence)
MALPVTALLLPLALLLHAARPDVVMTQSPLSLPVTPGEPASISCRSSQSLVHSNANTYLH
WYLQKPGQSPQLLIYKVSNRFSGVPDRFSGSGSGTDFTLKISRVEAEDVGVYYCSQNTH
VPPTFGQGTKLEIKRGGGGSGGGGSGGGGSQVQLVQSGAEVKKPGASVKVSCKASGYT
FTDYEMHWVRQAPGQGLEWMGALDPKTGDTAYSQKFKGRVTLTADESTSTAYMELSSL
RSEDTAVYYCTRFYSYTYWGQGTLVTVSSTTTPAPRPPTPAPTIASQPLSLRPEACRPAAG
GAVHTRGLDFACDIYIWAPLAGTCGVLLLSLVITLYCKRGRKKLLYIFKQPFMRPVQTTQE
EDGCSCRFPEEEEGGCELRVKFSRSADAPAYKQGQNQLYNELNLGRREEYDVLDKRRGR
DPEMGGKPRRKNPQEGLYNELQKDKMAEAYSEIGMKGERRRGKGHDGLYQGLSTATKD
TYDALHMQALPPRGSGATNFSLLKQAGDVEENPGPMALPVTALLLPLALLLHAARPSLF
NQEVQIPLTESYCGPCPKNWICYKNNCYQFFDESKNWYESQASCMSQNASLLKVYSKED
QDLLKLVKSYHWMGLVHIPTNGSWQWEDGSILSPNLLTIIEMQKGDCALYASSFKGYIEN
CSTPNTYICMQRTVSDPTRVETATETAWISLVTALHLVLGLSAVLGLLLLRWQFPAHYRRL
RHALWPSLPDLHRVLGQYLRDTAALSPPKATVSDTCEEVEPSLLEILPKSSERTPLPLECDF
TSPGDEGPPRSYLRQWVVIPPPLSSPGPQAS
SEQ ID NO: 42 (BM NKG2D-IL-21R-3 amino acid sequence)
MALPVTALLLPLALLLHAARPDVVMTQSPLSLPVTPGEPASISCRSSQSLVHSNANTYLH
WYLQKPGQSPQLLIYKVSNRFSGVPDRFSGSGSGTDFTLKISRVEAEDVGVYYCSQNTH
VPPTFGQGTKLEIKRGGGGSGGGGSGGGGSQVQLVQSGAEVKKPGASVKVSCKASGYT
FTDYEMHWVRQAPGQGLEWMGALDPKTGDTAYSQKFKGRVTLTADESTSTAYMELSSL
RSEDTAVYYCTRFYSYTYWGQGTLVTVSSTTTPAPRPPTPAPTIASQPLSLRPEACRPAAG
GAVHTRGLDFACDIYIWAPLAGTCGVLLLSLVITLYCKRGRKKLLYIFKQPFMRPVQTTQE
EDGCSCRFPEEEEGGCELRVKFSRSADAPAYKQGQNQLYNELNLGRREEYDVLDKRRGR
DPEMGGKPRRKNPQEGLYNELQKDKMAEAYSEIGMKGERRRGKGHDGLYQGLSTATKD
TYDALHMQALPPRGSGATNFSLLKQAGDVEENPGPMALPVTALLLPLALLLHAARPSLF
NQEVQIPLTESYCGPCPKNWICYKNNCYQFFDESKNWYESQASCMSQNASLLKVYSKED
QDLLKLVKSYHWMGLVHIPTNGSWQWEDGSILSPNLLTIIEMQKGDCALYASSFKGYIEN
CSTPNTYICMQRTVSDPTRVETATETAWISLVTALHLVLGLSAVLGLLLLRWQFPAHYRRL
RHALWPSLPDLHRVLGQYLRDTAALSPPKATVSDTCEEVEPSLLEILPKSSERTPLPLLELG
PWSPEVPSTLEVYSCHPPRSPAKRLQLTELQEPAELVESDGVPKPSFWPTAQNSGGSAYSE
ERDRPYGLVSIDTVTVLDAEGPCTWPCSCEDDGYPALDLDAGLEPSECDFTSPGDEGPPR
SYLRQWVVIPPPLSSPGPQAS
SEQ ID NO: 43 (BM NKG2D-IL-23R-1 amino acid sequence)
MALPVTALLLPLALLLHAARPDVVMTQSPLSLPVTPGEPASISCRSSQSLVHSNANTYLH
WYLQKPGQSPQLLIYKVSNRFSGVPDRFSGSGSGTDFTLKISRVEAEDVGVYYCSQNTH
VPPTFGQGTKLEIKRGGGGSGGGGSGGGGSQVQLVQSGAEVKKPGASVKVSCKASGYT
FTDYEMHWVRQAPGQGLEWMGALDPKTGDTAYSQKFKGRVTLTADESTSTAYMELSSL
RSEDTAVYYCTRFYSYTYWGQGTLVTVSSTTTPAPRPPTPAPTIASQPLSLRPEACRPAAG
GAVHTRGLDFACDIYIWAPLAGTCGVLLLSLVITLYCKRGRKKLLYIFKQPFMRPVQTTQE
EDGCSCRFPEEEEGGCELRVKFSRSADAPAYKQGQNQLYNELNLGRREEYDVLDKRRGR
DPEMGGKPRRKNPQEGLYNELQKDKMAEAYSEIGMKGERRRGKGHDGLYQGLSTATKD
TYDALHMQALPPRGSGATNFSLLKQAGDVEENPGPMALPVTALLLPLALLLHAARPSLF
NQEVQIPLTESYCGPCPKNWICYKNNCYQFFDESKNWYESQASCMSQNASLLKVYSKED
QDLLKLVKSYHWMGLVHIPTNGSWQWEDGSILSPNLLTIIEMQKGDCALYASSFKGYIEN
CSTPNTYICMQRTVSDPTRVETATETAWISLVTALHLVLGLSAVLGLLLLRWQFPAHYRRL
RHALWPSLPDLHRVLGQYLRDTAALSPPKATVSDTCEEVEPSLLEILPKSSERTPLPLRTGI
KRRILLLIPKWLYEDIPNMKNSNVVKMLQENSELMNNNSSEQVLYVDPMITEIKEIFIPEH
KPTDYKKENTGPLETRDYPQNSLFDNTTVVYIPDLNTGYKPQISNFLPEGSHLSN
SEQ ID NO: 44 (BM NKG2D-IL-23R-2 amino acid sequence)
MALPVTALLLPLALLLHAARPDVVMTQSPLSLPVTPGEPASISCRSSQSLVHSNANTYLH
WYLQKPGQSPQLLIYKVSNRFSGVPDRFSGSGSGTDFTLKISRVEAEDVGVYYCSQNTH
VPPTFGQGTKLEIKRGGGGSGGGGSGGGGSQVQLVQSGAEVKKPGASVKVSCKASGYT
FTDYEMHWVRQAPGQGLEWMGALDPKTGDTAYSQKFKGRVTLTADESTSTAYMELSSL
RSEDTAVYYCTRFYSYTYWGQGTLVTVSSTTTPAPRPPTPAPTIASQPLSLRPEACRPAAG
GAVHTRGLDFACDIYIWAPLAGTCGVLLLSLVITLYCKRGRKKLLYIFKQPFMRPVQTTQE
EDGCSCRFPEEEEGGCELRVKFSRSADAPAYKQGQNQLYNELNLGRREEYDVLDKRRGR
DPEMGGKPRRKNPQEGLYNELQKDKMAEAYSEIGMKGERRRGKGHDGLYQGLSTATKD
TYDALHMQALPPRGSGATNFSLLKQAGDVEENPGPMALPVTALLLPLALLLHAARPSLF
NQEVQIPLTESYCGPCPKNWICYKNNCYQFFDESKNWYESQASCMSQNASLLKVYSKED
QDLLKLVKSYHWMGLVHIPTNGSWQWEDGSILSPNLLTIIEMQKGDCALYASSFKGYIEN
CSTPNTYICMQRTVSDPTRVETATETAWISLVTALHLVLGLSAVLGLLLLRWQFPAHYRRL
RHALWPSLPDLHRVLGQYLRDTAALSPPKATVSDTCEEVEPSLLEILPKSSERTPLPLEFVS
CLGIVNEELPSINTYFPQNILESHENRIS
SEQ ID NO: 45 (BM NKG2D-IL-23R-3 amino acid sequence)
MALPVTALLLPLALLLHAARPDVVMTQSPLSLPVTPGEPASISCRSSQSLVHSNANTYLH
WYLQKPGQSPQLLIYKVSNRFSGVPDRFSGSGSGTDFTLKISRVEAEDVGVYYCSQNTH
VPPTFGQGTKLEIKRGGGGSGGGGSGGGGSQVQLVQSGAEVKKPGASVKVSCKASGYT
FTDYEMHWVRQAPGQGLEWMGALDPKTGDTAYSQKFKGRVTLTADESTSTAYMELSSL
RSEDTAVYYCTRFYSYTYWGQGTLVTVSSTTTPAPRPPTPAPTIASQPLSLRPEACRPAAG
GAVHTRGLDFACDIYIWAPLAGTCGVLLLSLVITLYCKRGRKKLLYIFKQPFMRPVQTTQE
EDGCSCRFPEEEEGGCELRVKFSRSADAPAYKQGQNQLYNELNLGRREEYDVLDKRRGR
DPEMGGKPRRKNPQEGLYNELQKDKMAEAYSEIGMKGERRRGKGHDGLYQGLSTATKD
TYDALHMQALPPRGSGATNFSLLKQAGDVEENPGPMALPVTALLLPLALLLHAARPSLF
NQEVQIPLTESYCGPCPKNWICYKNNCYQFFDESKNWYESQASCMSQNASLLKVYSKED
QDLLKLVKSYHWMGLVHIPTNGSWQWEDGSILSPNLLTIIEMQKGDCALYASSFKGYIEN
CSTPNTYICMQRTVSDPTRVETATETAWISLVTALHLVLGLSAVLGLLLLRWQFPAHYRRL
RHALWPSLPDLHRVLGQYLRDTAALSPPKATVSDTCEEVEPSLLEILPKSSERTPLPLRTGI
KRRILLLIPKWLYEDIPNMKNSNVVKMLQENSELMNNNSSEQVLYVDPMITEIKEIFIPEH
KPTDYKKENTGPLETRDYPQNSLFDNTTVVYIPDLNTGYKPQISNFLPEGSHLSNEFVSCL
GIVNEELPSINTYFPQNILESHENRIS
SEQ ID NO: 46 (BM NKG2D-GM-CSFRα amino acid sequence)
MALPVTALLLPLALLLHAARPDVVMTQSPLSLPVTPGEPASISCRSSQSLVHSNANTYLH
WYLQKPGQSPQLLIYKVSNRFSGVPDRFSGSGSGTDFTLKISRVEAEDVGVYYCSQNTH
VPPTFGQGTKLEIKRGGGGSGGGGSGGGGSQVQLVQSGAEVKKPGASVKVSCKASGYT
FTDYEMHWVRQAPGQGLEWMGALDPKTGDTAYSQKFKGRVTLTADESTSTAYMELSSL
RSEDTAVYYCTRFYSYTYWGQGTLVTVSSTTTPAPRPPTPAPTIASQPLSLRPEACRPAAG
GAVHTRGLDFACDIYIWAPLAGTCGVLLLSLVITLYCKRGRKKLLYIFKQPFMRPVQTTQE
EDGCSCRFPEEEEGGCELRVKFSRSADAPAYKQGQNQLYNELNLGRREEYDVLDKRRGR
DPEMGGKPRRKNPQEGLYNELQKDKMAEAYSEIGMKGERRRGKGHDGLYQGLSTATKD
TYDALHMQALPPRGSGATNFSLLKQAGDVEENPGPMALPVTALLLPLALLLHAARPSLF
NQEVQIPLTESYCGPCPKNWICYKNNCYQFFDESKNWYESQASCMSQNASLLKVYSKED
QDLLKLVKSYHWMGLVHIPTNGSWQWEDGSILSPNLLTIIEMQKGDCALYASSFKGYIEN
CSTPNTYICMQRTVSDPTRVETATETAWISLVTALHLVLGLSAVLGLLLLRWQFPAHYRRL
RHALWPSLPDLHRVLGQYLRDTAALSPPKATVSDTCEEVEPSLLEILPKSSERTPLPLEVE
DEIIWEEFTPEEGKGYREEVLTVKEIT
SEQ ID NO: 47 (BM NKG2D-GM-CSFRβ-1 amino acid sequence)
MALPVTALLLPLALLLHAARPDVVMTQSPLSLPVTPGEPASISCRSSQSLVHSNANTYLH
WYLQKPGQSPQLLIYKVSNRFSGVPDRFSGSGSGTDFTLKISRVEAEDVGVYYCSQNTH
VPPTFGQGTKLEIKRGGGGSGGGGSGGGGSQVQLVQSGAEVKKPGASVKVSCKASGYT
FTDYEMHWVRQAPGQGLEWMGALDPKTGDTAYSQKFKGRVTLTADESTSTAYMELSSL
RSEDTAVYYCTRFYSYTYWGQGTLVTVSSTTTPAPRPPTPAPTIASQPLSLRPEACRPAAG
GAVHTRGLDFACDIYIWAPLAGTCGVLLLSLVITLYCKRGRKKLLYIFKQPFMRPVQTTQE
EDGCSCRFPEEEEGGCELRVKFSRSADAPAYKQGQNQLYNELNLGRREEYDVLDKRRGR
DPEMGGKPRRKNPQEGLYNELQKDKMAEAYSEIGMKGERRRGKGHDGLYQGLSTATKD
TYDALHMQALPPRGSGATNFSLLKQAGDVEENPGPMALPVTALLLPLALLLHAARPSLF
NQEVQIPLTESYCGPCPKNWICYKNNCYQFFDESKNWYESQASCMSQNASLLKVYSKED
QDLLKLVKSYHWMGLVHIPTNGSWQWEDGSILSPNLLTIIEMQKGDCALYASSFKGYIEN
CSTPNTYICMQRTVSDPTRVETATETAWISLVTALHLVLGLSAVLGLLLLRWQFPAHYRRL
RHALWPSLPDLHRVLGQYLRDTAALSPPKATVSDTCEEVEPSLLEILPKSSERTPLPLDTE
DPGVASGYVSSADLVFTPNSGASSVSGPPGAPGPVKSGFEGYVELPPIEGRSPRSQPEGLL
VLQQVGDYCFLPGLGPGPLSLRSKQVPVIQLFKALKQQDYLSLPPWEVNKPGEVC
SEQ ID NO: 48 (BM NKG2D-GM-CSFRβ-2 amino acid sequence)
MALPVTALLLPLALLLHAARPDVVMTQSPLSLPVTPGEPASISCRSSQSLVHSNANTYLH
WYLQKPGQSPQLLIYKVSNRFSGVPDRFSGSGSGTDFTLKISRVEAEDVGVYYCSQNTH
VPPTFGQGTKLEIKRGGGGSGGGGSGGGGSQVQLVQSGAEVKKPGASVKVSCKASGYT
FTDYEMHWVRQAPGQGLEWMGALDPKTGDTAYSQKFKGRVTLTADESTSTAYMELSSL
RSEDTAVYYCTRFYSYTYWGQGTLVTVSSTTTPAPRPPTPAPTIASQPLSLRPEACRPAAG
GAVHTRGLDFACDIYIWAPLAGTCGVLLLSLVITLYCKRGRKKLLYIFKQPFMRPVQTTQE
EDGCSCRFPEEEEGGCELRVKFSRSADAPAYKQGQNQLYNELNLGRREEYDVLDKRRGR
DPEMGGKPRRKNPQEGLYNELQKDKMAEAYSEIGMKGERRRGKGHDGLYQGLSTATKD
TYDALHMQALPPRGSGATNFSLLKQAGDVEENPGPMALPVTALLLPLALLLHAARPSLF
NQEVQIPLTESYCGPCPKNWICYKNNCYQFFDESKNWYESQASCMSQNASLLKVYSKED
QDLLKLVKSYHWMGLVHIPTNGSWQWEDGSILSPNLLTIIEMQKGDCALYASSFKGYIEN
CSTPNTYICMQRTVSDPTRVETATETAWISLVTALHLVLGLSAVLGLLLLRWQFPAHYRRL
RHALWPSLPDLHRVLGQYLRDTAALSPPKATVSDTCEEVEPSLLEILPKSSERTPLPLEKQ
ASSFDFNGPYLGPPHSRSLPDILGQPEPPQEGGSQKSPPPGSLEYLCLPAGGQVQLVPLAQ
DTEDPGVASGYVSSADLVFTPNSGASSVSGPPGAPGPVKSGFEGYVELPPIEGRSPRSQPE
GLLVLQQVGDYCFLPGLGPGPLSLRSKQVPVIQLFKALKQQDYLSLPPWEVNKPGEVC
SEQ ID NO: 49 (BM NKG2D-IL-9R-1 amino acid sequence)
MALPVTALLLPLALLLHAARPDVVMTQSPLSLPVTPGEPASISCRSSQSLVHSNANTYLH
WYLQKPGQSPQLLIYKVSNRFSGVPDRFSGSGSGTDFTLKISRVEAEDVGVYYCSQNTH
VPPTFGQGTKLEIKRGGGGSGGGGSGGGGSQVQLVQSGAEVKKPGASVKVSCKASGYT
FTDYEMHWVRQAPGQGLEWMGALDPKTGDTAYSQKFKGRVTLTADESTSTAYMELSSL
RSEDTAVYYCTRFYSYTYWGQGTLVTVSSTTTPAPRPPTPAPTIASQPLSLRPEACRPAAG
GAVHTRGLDFACDIYIWAPLAGTCGVLLLSLVITLYCKRGRKKLLYIFKQPFMRPVQTTQE
EDGCSCRFPEEEEGGCELRVKFSRSADAPAYKQGQNQLYNELNLGRREEYDVLDKRRGR
DPEMGGKPRRKNPQEGLYNELQKDKMAEAYSEIGMKGERRRGKGHDGLYQGLSTATKD
TYDALHMQALPPRGSGATNFSLLKQAGDVEENPGPMALPVTALLLPLALLLHAARPSLF
NQEVQIPLTESYCGPCPKNWICYKNNCYQFFDESKNWYESQASCMSQNASLLKVYSKED
QDLLKLVKSYHWMGLVHIPTNGSWQWEDGSILSPNLLTIIEMQKGDCALYASSFKGYIEN
CSTPNTYICMQRTVSDPTRVETATETAWISLVTALHLVLGLSAVLGLLLLRWQFPAHYRRL
RHALWPSLPDLHRVLGQYLRDTAALSPPKATVSDTCEEVEPSLLEILPKSSERTPLPLMFF
QPLYSVHNGNFQTWMGAHGAGVLLSQDCAGTPQGALEPCVQEATALLTCGPARPWKSV
ALEEEQEGPGTRLPGNLSSEDVLPAGCTEWRVQTLAYLPQEDWAPTSLTRPAPPDSEGSR
SSSSSSSSNNNNYCALGCYGGWHLSALPGNTQSS
SEQ ID NO: 50 (BM NKG2D-IL-9R-2 amino acid sequence)
MALPVTALLLPLALLLHAARPDVVMTQSPLSLPVTPGEPASISCRSSQSLVHSNANTYLH
WYLQKPGQSPQLLIYKVSNRFSGVPDRFSGSGSGTDFTLKISRVEAEDVGVYYCSQNTH
VPPTFGQGTKLEIKRGGGGSGGGGSGGGGSQVQLVQSGAEVKKPGASVKVSCKASGYT
FTDYEMHWVRQAPGQGLEWMGALDPKTGDTAYSQKFKGRVTLTADESTSTAYMELSSL
RSEDTAVYYCTRFYSYTYWGQGTLVTVSSTTTPAPRPPTPAPTIASQPLSLRPEACRPAAG
GAVHTRGLDFACDIYIWAPLAGTCGVLLLSLVITLYCKRGRKKLLYIFKQPFMRPVQTTQE
EDGCSCRFPEEEEGGCELRVKFSRSADAPAYKQGQNQLYNELNLGRREEYDVLDKRRGR
DPEMGGKPRRKNPQEGLYNELQKDKMAEAYSEIGMKGERRRGKGHDGLYQGLSTATKD
TYDALHMQALPPRGSGATNFSLLKQAGDVEENPGPMALPVTALLLPLALLLHAARPSLF
NQEVQIPLTESYCGPCPKNWICYKNNCYQFFDESKNWYESQASCMSQNASLLKVYSKED
QDLLKLVKSYHWMGLVHIPTNGSWQWEDGSILSPNLLTIIEMQKGDCALYASSFKGYIEN
CSTPNTYICMQRTVSDPTRVETATETAWISLVTALHLVLGLSAVLGLLLLRWQFPAHYRRL
RHALWPSLPDLHRVLGQYLRDTAALSPPKATVSDTCEEVEPSLLEILPKSSERTPLPLDVLP
AGCTEWRVQTLAYLPQEDWAPTSLTRPAPPDSEGSRSSSSSSSSNNNNYCALGCYGGWH
LSALPGNTQSS
SEQ ID NO: 51 (BM NKG2D-IL-9R-3 amino acid sequence)
MALPVTALLLPLALLLHAARPDVVMTQSPLSLPVTPGEPASISCRSSQSLVHSNANTYLH
WYLQKPGQSPQLLIYKVSNRFSGVPDRFSGSGSGTDFTLKISRVEAEDVGVYYCSQNTH
VPPTFGQGTKLEIKRGGGGSGGGGSGGGGSQVQLVQSGAEVKKPGASVKVSCKASGYT
FTDYEMHWVRQAPGQGLEWMGALDPKTGDTAYSQKFKGRVTLTADESTSTAYMELSSL
RSEDTAVYYCTRFYSYTYWGQGTLVTVSSTTTPAPRPPTPAPTIASQPLSLRPEACRPAAG
GAVHTRGLDFACDIYIWAPLAGTCGVLLLSLVITLYCKRGRKKLLYIFKQPFMRPVQTTQE
EDGCSCRFPEEEEGGCELRVKFSRSADAPAYKQGQNQLYNELNLGRREEYDVLDKRRGR
DPEMGGKPRRKNPQEGLYNELQKDKMAEAYSEIGMKGERRRGKGHDGLYQGLSTATKD
TYDALHMQALPPRGSGATNFSLLKQAGDVEENPGPMALPVTALLLPLALLLHAARPSLF
NQEVQIPLTESYCGPCPKNWICYKNNCYQFFDESKNWYESQASCMSQNASLLKVYSKED
QDLLKLVKSYHWMGLVHIPTNGSWQWEDGSILSPNLLTIIEMQKGDCALYASSFKGYIEN
CSTPNTYICMQRTVSDPTRVETATETAWISLVTALHLVLGLSAVLGLLLLRWQFPAHYRRL
RHALWPSLPDLHRVLGQYLRDTAALSPPKATVSDTCEEVEPSLLEILPKSSERTPLPLMFF
QPLYSVHNGNFQTWMGAHGAGVLLSDVLPAGCTEWRVQTLAYLPQEDWAPTSLTRPAP
PDSEGSRSSSSSSSSNNNNYCALGCYGGWHLSALPGNTQSS
SEQ ID NO: 52 (BM NKG2D-IL-7Rα-IL12Rβ1 amino acid sequence)
MALPVTALLLPLALLLHAARPDVVMTQSPLSLPVTPGEPASISCRSSQSLVHSNANTYLH
WYLQKPGQSPQLLIYKVSNRFSGVPDRFSGSGSGTDFTLKISRVEAEDVGVYYCSQNTH
VPPTFGQGTKLEIKRGGGGSGGGGSGGGGSQVQLVQSGAEVKKPGASVKVSCKASGYT
FTDYEMHWVRQAPGQGLEWMGALDPKTGDTAYSQKFKGRVTLTADESTSTAYMELSSL
RSEDTAVYYCTRFYSYTYWGQGTLVTVSSTTTPAPRPPTPAPTIASQPLSLRPEACRPAAG
GAVHTRGLDFACDIYIWAPLAGTCGVLLLSLVITLYCKRGRKKLLYIFKQPFMRPVQTTQE
EDGCSCRFPEEEEGGCELRVKFSRSADAPAYKQGQNQLYNELNLGRREEYDVLDKRRGR
DPEMGGKPRRKNPQEGLYNELQKDKMAEAYSEIGMKGERRRGKGHDGLYQGLSTATKD
TYDALHMQALPPRGSGATNFSLLKQAGDVEENPGPMALPVTALLLPLALLLHAARPSLF
NQEVQIPLTESYCGPCPKNWICYKNNCYQFFDESKNWYESQASCMSQNASLLKVYSKED
QDLLKLVKSYHWMGLVHIPTNGSWQWEDGSILSPNLLTIIEMQKGDCALYASSFKGYIEN
CSTPNTYICMQRTVSDPTRVETATETAWISLVTALHLVLGLSAVLGLLLLRWQFPAHYRRL
RHALWPSLPDLHRVLGQYLRDTAALSPPKATVSDTCEEVEPSLLEILPKSSERTPLPLARD
EVEGFLQDTFPQQLEESEKQRLGGDVQSPNCPSEDVVITPESFGRDSSLTCLAGNVSACD
APILSSSRSLDCRESGKNGPHVYQDLLLSLGTTNSTLPPPFSLQSGILTLNPVAQGQPILTSL
GSNQEEAYVTMSSFYQNQSLQEALVVEMSWDKGERTEPLEKTELPEGAPELALDTELSL
EDGDRCKAKM
SEQ ID NO: 53 (BM NKG2D-IL-7Rα-IL15Rα amino acid sequence)
MALPVTALLLPLALLLHAARPDVVMTQSPLSLPVTPGEPASISCRSSQSLVHSNANTYLH
WYLQKPGQSPQLLIYKVSNRFSGVPDRFSGSGSGTDFTLKISRVEAEDVGVYYCSQNTH
VPPTFGQGTKLEIKRGGGGSGGGGSGGGGSQVQLVQSGAEVKKPGASVKVSCKASGYT
FTDYEMHWVRQAPGQGLEWMGALDPKTGDTAYSQKFKGRVTLTADESTSTAYMELSSL
RSEDTAVYYCTRFYSYTYWGQGTLVTVSSTTTPAPRPPTPAPTIASQPLSLRPEACRPAAG
GAVHTRGLDFACDIYIWAPLAGTCGVLLLSLVITLYCKRGRKKLLYIFKQPFMRPVQTTQE
EDGCSCRFPEEEEGGCELRVKFSRSADAPAYKQGQNQLYNELNLGRREEYDVLDKRRGR
DPEMGGKPRRKNPQEGLYNELQKDKMAEAYSEIGMKGERRRGKGHDGLYQGLSTATKD
TYDALHMQALPPRGSGATNFSLLKQAGDVEENPGPMALPVTALLLPLALLLHAARPSLF
NQEVQIPLTESYCGPCPKNWICYKNNCYQFFDESKNWYESQASCMSQNASLLKVYSKED
QDLLKLVKSYHWMGLVHIPTNGSWQWEDGSILSPNLLTIIEMQKGDCALYASSFKGYIEN
CSTPNTYICMQRTVSDPTRVETATETAWISLVTALHLVLGLSAVLGLLLLRWQFPAHYRRL
RHALWPSLPDLHRVLGQYLRDTAALSPPKATVSDTCEEVEPSLLEILPKSSERTPLPLARD
EVEGFLQDTFPQQLEESEKQRLGGDVQSPNCPSEDVVITPESFGRDSSLTCLAGNVSACD
APILSSSRSLDCRESGKNGPHVYQDLLLSLGTTNSTLPPPFSLQSGILTLNPVAQGQPILTSL
GSNQEEAYVTMSSFYQNQKSRQTPPLASVEMEAMEALPVTWGTSSRDEDLENCSHHL
SEQ ID NO: 54 (BM NKG2D-IL-7Rα-IL15R7Rα-1 amino acid sequence)
MALPVTALLLPLALLLHAARPDVVMTQSPLSLPVTPGEPASISCRSSQSLVHSNANTYLH
WYLQKPGQSPQLLIYKVSNRFSGVPDRFSGSGSGTDFTLKISRVEAEDVGVYYCSQNTH
VPPTFGQGTKLEIKRGGGGSGGGGSGGGGSQVQLVQSGAEVKKPGASVKVSCKASGYT
FTDYEMHWVRQAPGQGLEWMGALDPKTGDTAYSQKFKGRVTLTADESTSTAYMELSSL
RSEDTAVYYCTRFYSYTYWGQGTLVTVSSTTTPAPRPPTPAPTIASQPLSLRPEACRPAAG
GAVHTRGLDFACDIYIWAPLAGTCGVLLLSLVITLYCKRGRKKLLYIFKQPFMRPVQTTQE
EDGCSCRFPEEEEGGCELRVKFSRSADAPAYKQGQNQLYNELNLGRREEYDVLDKRRGR
DPEMGGKPRRKNPQEGLYNELQKDKMAEAYSEIGMKGERRRGKGHDGLYQGLSTATKD
TYDALHMQALPPRGSGATNFSLLKQAGDVEENPGPMALPVTALLLPLALLLHAARPSLF
NQEVQIPLTESYCGPCPKNWICYKNNCYQFFDESKNWYESQASCMSQNASLLKVYSKED
QDLLKLVKSYHWMGLVHIPTNGSWQWEDGSILSPNLLTIIEMQKGDCALYASSFKGYIEN
CSTPNTYICMQRTVSDPTRVETATETAWISLVTALHLVLGLSAVLGLLLLRWQFPAHYRRL
RHALWPSLPDLHRVLGQYLRDTAALSPPKATVSDTCEEVEPSLLEILPKSSERTPLPLARD
EVEGFLQDTFPQQLEESEKQRLGGDVQSPNCPSEDVVITPESFGRDSSLTCLAGNVSACD
APILSSSRSLDCRESGKNGPHVYQDLLLSLGTTNSTLPPPFSLQSGILTLNPVAQGQPILTSL
GSNQEEAYVTMSSFYQNQVTQLLLQQDKVPEPASLSSNHSLTSCFTNQGYFFFHLPDALE
IEACQVYFTYDPYSEEDPDEGVAGAPTGSSPQPLQPLSGEDDAYCTFPSRDDLLLFSPSLL
GGPSPPSTAPGGSGAGEERMPPSLQERVPRDWDPQPLGPPTPGVPDLVDFQPPPELVLREA
GEEVPDAGPREGVSFPWSRPPGQGEFRALNARLPLNTDAYLSLQELQGQDPTHLV
SEQ ID NO: 55 (BM NKG2D-IL-7Rα-IL15R7Rα-2 amino acid sequence)
MALPVTALLLPLALLLHAARPDVVMTQSPLSLPVTPGEPASISCRSSQSLVHSNANTYLH
WYLQKPGQSPQLLIYKVSNRFSGVPDRFSGSGSGTDFTLKISRVEAEDVGVYYCSQNTH
VPPTFGQGTKLEIKRGGGGSGGGGSGGGGSQVQLVQSGAEVKKPGASVKVSCKASGYT
FTDYEMHWVRQAPGQGLEWMGALDPKTGDTAYSQKFKGRVTLTADESTSTAYMELSSL
RSEDTAVYYCTRFYSYTYWGQGTLVTVSSTTTPAPRPPTPAPTIASQPLSLRPEACRPAAG
GAVHTRGLDFACDIYIWAPLAGTCGVLLLSLVITLYCKRGRKKLLYIFKQPFMRPVQTTQE
EDGCSCRFPEEEEGGCELRVKFSRSADAPAYKQGQNQLYNELNLGRREEYDVLDKRRGR
DPEMGGKPRRKNPQEGLYNELQKDKMAEAYSEIGMKGERRRGKGHDGLYQGLSTATKD
TYDALHMQALPPRGSGATNFSLLKQAGDVEENPGPMALPVTALLLPLALLLHAARPSLF
NQEVQIPLTESYCGPCPKNWICYKNNCYQFFDESKNWYESQASCMSQNASLLKVYSKED
QDLLKLVKSYHWMGLVHIPTNGSWQWEDGSILSPNLLTIIEMQKGDCALYASSFKGYIEN
CSTPNTYICMQRTVSDPTRVETATETAWISLVTALHLVLGLSAVLGLLLLRWQFPAHYRRL
RHALWPSLPDLHRVLGQYLRDTAALSPPKATVSDTCEEVEPSLLEILPKSSERTPLPLARD
EVEGFLQDTFPQQLEESEKQRLGGDVQSPNCPSEDVVITPESFGRDSSLTCLAGNVSACD
APILSSSRSLDCRESGKNGPHVYQDLLLSLGTTNSTLPPPFSLQSGILTLNPVAQGQPILTSL
GSNQEEAYVTMSSFYQNQEPASLSSNHSLTSCFTNQGYFFFHLPDALEIEACQVYFTYDP
YSEEDPDEGVAGAPTGSSPQPLQPLSGEDDAYCTFPSRDDLLLFSEFRALNARLPLNTDAY
LSLQELQGQDPTHLV
SEQ ID NO: 56 (BM NKG2D-IL-7Rα-IL-21R-1 amino acid sequence)
MALPVTALLLPLALLLHAARPDVVMTQSPLSLPVTPGEPASISCRSSQSLVHSNANTYLH
WYLQKPGQSPQLLIYKVSNRFSGVPDRFSGSGSGTDFTLKISRVEAEDVGVYYCSQNTH
VPPTFGQGTKLEIKRGGGGSGGGGSGGGGSQVQLVQSGAEVKKPGASVKVSCKASGYT
FTDYEMHWVRQAPGQGLEWMGALDPKTGDTAYSQKFKGRVTLTADESTSTAYMELSSL
RSEDTAVYYCTRFYSYTYWGQGTLVTVSSTTTPAPRPPTPAPTIASQPLSLRPEACRPAAG
GAVHTRGLDFACDIYIWAPLAGTCGVLLLSLVITLYCKRGRKKLLYIFKQPFMRPVQTTQE
EDGCSCRFPEEEEGGCELRVKFSRSADAPAYKQGQNQLYNELNLGRREEYDVLDKRRGR
DPEMGGKPRRKNPQEGLYNELQKDKMAEAYSEIGMKGERRRGKGHDGLYQGLSTATKD
TYDALHMQALPPRGSGATNFSLLKQAGDVEENPGPMALPVTALLLPLALLLHAARPSLF
NQEVQIPLTESYCGPCPKNWICYKNNCYQFFDESKNWYESQASCMSQNASLLKVYSKED
QDLLKLVKSYHWMGLVHIPTNGSWQWEDGSILSPNLLTIIEMQKGDCALYASSFKGYIEN
CSTPNTYICMQRTVSDPTRVETATETAWISLVTALHLVLGLSAVLGLLLLRWQFPAHYRRL
RHALWPSLPDLHRVLGQYLRDTAALSPPKATVSDTCEEVEPSLLEILPKSSERTPLPLARD
EVEGFLQDTFPQQLEESEKQRLGGDVQSPNCPSEDVVITPESFGRDSSLTCLAGNVSACD
APILSSSRSLDCRESGKNGPHVYQDLLLSLGTTNSTLPPPFSLQSGILTLNPVAQGQPILTSL
GSNQEEAYVTMSSFYQNQLELGPWSPEVPSTLEVYSCHPPRSPAKRLQLTELQEPAELVES
DGVPKPSFWPTAQNSGGSAYSEERDRPYGLVSIDTVTVLDAEGPCTWPCSCEDDGYPAL
DLDAGLEPS
SEQ ID NO: 57 (BM NKG2D-IL-7Rα-IL-21R-2 amino acid sequence)
MALPVTALLLPLALLLHAARPDVVMTQSPLSLPVTPGEPASISCRSSQSLVHSNANTYLH
WYLQKPGQSPQLLIYKVSNRFSGVPDRFSGSGSGTDFTLKISRVEAEDVGVYYCSQNTH
VPPTFGQGTKLEIKRGGGGSGGGGSGGGGSQVQLVQSGAEVKKPGASVKVSCKASGYT
FTDYEMHWVRQAPGQGLEWMGALDPKTGDTAYSQKFKGRVTLTADESTSTAYMELSSL
RSEDTAVYYCTRFYSYTYWGQGTLVTVSSTTTPAPRPPTPAPTIASQPLSLRPEACRPAAG
GAVHTRGLDFACDIYIWAPLAGTCGVLLLSLVITLYCKRGRKKLLYIFKQPFMRPVQTTQE
EDGCSCRFPEEEEGGCELRVKFSRSADAPAYKQGQNQLYNELNLGRREEYDVLDKRRGR
DPEMGGKPRRKNPQEGLYNELQKDKMAEAYSEIGMKGERRRGKGHDGLYQGLSTATKD
TYDALHMQALPPRGSGATNFSLLKQAGDVEENPGPMALPVTALLLPLALLLHAARPSLF
NQEVQIPLTESYCGPCPKNWICYKNNCYQFFDESKNWYESQASCMSQNASLLKVYSKED
QDLLKLVKSYHWMGLVHIPTNGSWQWEDGSILSPNLLTIIEMQKGDCALYASSFKGYIEN
CSTPNTYICMQRTVSDPTRVETATETAWISLVTALHLVLGLSAVLGLLLLRWQFPAHYRRL
RHALWPSLPDLHRVLGQYLRDTAALSPPKATVSDTCEEVEPSLLEILPKSSERTPLPLARD
EVEGFLQDTFPQQLEESEKQRLGGDVQSPNCPSEDVVITPESFGRDSSLTCLAGNVSACD
APILSSSRSLDCRESGKNGPHVYQDLLLSLGTTNSTLPPPFSLQSGILTLNPVAQGQPILTSL
GSNQEEAYVTMSSFYQNQECDFTSPGDEGPPRSYLRQWVVIPPPLSSPGPQAS
SEQ ID NO: 58 (BM NKG2D-IL-7Rα-IL-21R-3 amino acid sequence)
MALPVTALLLPLALLLHAARPDVVMTQSPLSLPVTPGEPASISCRSSQSLVHSNANTYLH
WYLQKPGQSPQLLIYKVSNRFSGVPDRFSGSGSGTDFTLKISRVEAEDVGVYYCSQNTH
VPPTFGQGTKLEIKRGGGGSGGGGSGGGGSQVQLVQSGAEVKKPGASVKVSCKASGYT
FTDYEMHWVRQAPGQGLEWMGALDPKTGDTAYSQKFKGRVTLTADESTSTAYMELSSL
RSEDTAVYYCTRFYSYTYWGQGTLVTVSSTTTPAPRPPTPAPTIASQPLSLRPEACRPAAG
GAVHTRGLDFACDIYIWAPLAGTCGVLLLSLVITLYCKRGRKKLLYIFKQPFMRPVQTTQE
EDGCSCRFPEEEEGGCELRVKFSRSADAPAYKQGQNQLYNELNLGRREEYDVLDKRRGR
DPEMGGKPRRKNPQEGLYNELQKDKMAEAYSEIGMKGERRRGKGHDGLYQGLSTATKD
TYDALHMQALPPRGSGATNFSLLKQAGDVEENPGPMALPVTALLLPLALLLHAARPSLF
NQEVQIPLTESYCGPCPKNWICYKNNCYQFFDESKNWYESQASCMSQNASLLKVYSKED
QDLLKLVKSYHWMGLVHIPTNGSWQWEDGSILSPNLLTIIEMQKGDCALYASSFKGYIEN
CSTPNTYICMQRTVSDPTRVETATETAWISLVTALHLVLGLSAVLGLLLLRWQFPAHYRRL
RHALWPSLPDLHRVLGQYLRDTAALSPPKATVSDTCEEVEPSLLEILPKSSERTPLPLARD
EVEGFLQDTFPQQLEESEKQRLGGDVQSPNCPSEDVVITPESFGRDSSLTCLAGNVSACD
APILSSSRSLDCRESGKNGPHVYQDLLLSLGTTNSTLPPPFSLQSGILTLNPVAQGQPILTSL
GSNQEEAYVTMSSFYQNQLELGPWSPEVPSTLEVYSCHPPRSPAKRLQLTELQEPAELVES
DGVPKPSFWPTAQNSGGSAYSEERDRPYGLVSIDTVTVLDAEGPCTWPCSCEDDGYPAL
DLDAGLEPSECDFTSPGDEGPPRSYLRQWVVIPPPLSSPGPQAS
SEQ ID NO: 59 (BM NKG2D-IL-7Rα-IL-23R-2 amino acid sequence)
MALPVTALLLPLALLLHAARPDVVMTQSPLSLPVTPGEPASISCRSSQSLVHSNANTYLH
WYLQKPGQSPQLLIYKVSNRFSGVPDRFSGSGSGTDFTLKISRVEAEDVGVYYCSQNTH
VPPTFGQGTKLEIKRGGGGSGGGGSGGGGSQVQLVQSGAEVKKPGASVKVSCKASGYT
FTDYEMHWVRQAPGQGLEWMGALDPKTGDTAYSQKFKGRVTLTADESTSTAYMELSSL
RSEDTAVYYCTRFYSYTYWGQGTLVTVSSTTTPAPRPPTPAPTIASQPLSLRPEACRPAAG
GAVHTRGLDFACDIYIWAPLAGTCGVLLLSLVITLYCKRGRKKLLYIFKQPFMRPVQTTQE
EDGCSCRFPEEEEGGCELRVKFSRSADAPAYKQGQNQLYNELNLGRREEYDVLDKRRGR
DPEMGGKPRRKNPQEGLYNELQKDKMAEAYSEIGMKGERRRGKGHDGLYQGLSTATKD
TYDALHMQALPPRGSGATNFSLLKQAGDVEENPGPMALPVTALLLPLALLLHAARPSLF
NQEVQIPLTESYCGPCPKNWICYKNNCYQFFDESKNWYESQASCMSQNASLLKVYSKED
QDLLKLVKSYHWMGLVHIPTNGSWQWEDGSILSPNLLTIIEMQKGDCALYASSFKGYIEN
CSTPNTYICMQRTVSDPTRVETATETAWISLVTALHLVLGLSAVLGLLLLRWQFPAHYRRL
RHALWPSLPDLHRVLGQYLRDTAALSPPKATVSDTCEEVEPSLLEILPKSSERTPLPLARD
EVEGFLQDTFPQQLEESEKQRLGGDVQSPNCPSEDVVITPESFGRDSSLTCLAGNVSACD
APILSSSRSLDCRESGKNGPHVYQDLLLSLGTTNSTLPPPFSLQSGILTLNPVAQGQPILTSL
GSNQEEAYVTMSSFYQNQEFVSCLGIVNEELPSINTYFPQNILESHENRIS
SEQ ID NO: 60 (BM NKG2D-IL-7Rα-GM-CSFRα amino acid sequence)
MALPVTALLLPLALLLHAARPDVVMTQSPLSLPVTPGEPASISCRSSQSLVHSNANTYLH
WYLQKPGQSPQLLIYKVSNRFSGVPDRFSGSGSGTDFTLKISRVEAEDVGVYYCSQNTH
VPPTFGQGTKLEIKRGGGGSGGGGSGGGGSQVQLVQSGAEVKKPGASVKVSCKASGYT
FTDYEMHWVRQAPGQGLEWMGALDPKTGDTAYSQKFKGRVTLTADESTSTAYMELSSL
RSEDTAVYYCTRFYSYTYWGQGTLVTVSSTTTPAPRPPTPAPTIASQPLSLRPEACRPAAG
GAVHTRGLDFACDIYIWAPLAGTCGVLLLSLVITLYCKRGRKKLLYIFKQPFMRPVQTTQE
EDGCSCRFPEEEEGGCELRVKFSRSADAPAYKQGQNQLYNELNLGRREEYDVLDKRRGR
DPEMGGKPRRKNPQEGLYNELQKDKMAEAYSEIGMKGERRRGKGHDGLYQGLSTATKD
TYDALHMQALPPRGSGATNFSLLKQAGDVEENPGPMALPVTALLLPLALLLHAARPSLF
NQEVQIPLTESYCGPCPKNWICYKNNCYQFFDESKNWYESQASCMSQNASLLKVYSKED
QDLLKLVKSYHWMGLVHIPTNGSWQWEDGSILSPNLLTIIEMQKGDCALYASSFKGYIEN
CSTPNTYICMQRTVSDPTRVETATETAWISLVTALHLVLGLSAVLGLLLLRWQFPAHYRRL
RHALWPSLPDLHRVLGQYLRDTAALSPPKATVSDTCEEVEPSLLEILPKSSERTPLPLARD
EVEGFLQDTFPQQLEESEKQRLGGDVQSPNCPSEDVVITPESFGRDSSLTCLAGNVSACD
APILSSSRSLDCRESGKNGPHVYQDLLLSLGTTNSTLPPPFSLQSGILTLNPVAQGQPILTSL
GSNQEEAYVTMSSFYQNQEVEDEIIWEEFTPEEGKGYREEVLTVKEIT
SEQ ID NO: 61 (BM NKG2D-IL-7Rα-GM-CSFRβ-1 amino acid sequence)
MALPVTALLLPLALLLHAARPDVVMTQSPLSLPVTPGEPASISCRSSQSLVHSNANTYLH
WYLQKPGQSPQLLIYKVSNRFSGVPDRFSGSGSGTDFTLKISRVEAEDVGVYYCSQNTH
VPPTFGQGTKLEIKRGGGGSGGGGSGGGGSQVQLVQSGAEVKKPGASVKVSCKASGYT
FTDYEMHWVRQAPGQGLEWMGALDPKTGDTAYSQKFKGRVTLTADESTSTAYMELSSL
RSEDTAVYYCTRFYSYTYWGQGTLVTVSSTTTPAPRPPTPAPTIASQPLSLRPEACRPAAG
GAVHTRGLDFACDIYIWAPLAGTCGVLLLSLVITLYCKRGRKKLLYIFKQPFMRPVQTTQE
EDGCSCRFPEEEEGGCELRVKFSRSADAPAYKQGQNQLYNELNLGRREEYDVLDKRRGR
DPEMGGKPRRKNPQEGLYNELQKDKMAEAYSEIGMKGERRRGKGHDGLYQGLSTATKD
TYDALHMQALPPRGSGATNFSLLKQAGDVEENPGPMALPVTALLLPLALLLHAARPSLF
NQEVQIPLTESYCGPCPKNWICYKNNCYQFFDESKNWYESQASCMSQNASLLKVYSKED
QDLLKLVKSYHWMGLVHIPTNGSWQWEDGSILSPNLLTIIEMQKGDCALYASSFKGYIEN
CSTPNTYICMQRTVSDPTRVETATETAWISLVTALHLVLGLSAVLGLLLLRWQFPAHYRRL
RHALWPSLPDLHRVLGQYLRDTAALSPPKATVSDTCEEVEPSLLEILPKSSERTPLPLARD
EVEGFLQDTFPQQLEESEKQRLGGDVQSPNCPSEDVVITPESFGRDSSLTCLAGNVSACD
APILSSSRSLDCRESGKNGPHVYQDLLLSLGTTNSTLPPPFSLQSGILTLNPVAQGQPILTSL
GSNQEEAYVTMSSFYQNQDTEDPGVASGYVSSADLVFTPNSGASSVSGPPGAPGPVKSGF
EGYVELPPIEGRSPRSQPEGLLVLQQVGDYCFLPGLGPGPLSLRSKQVPVIQLFKALKQQD
YLSLPPWEVNKPGEVC
SEQ ID NO: 62 (BM NKG2D-IL-7Rα-GM-CSFRβ-2 amino acid sequence)
MALPVTALLLPLALLLHAARPDVVMTQSPLSLPVTPGEPASISCRSSQSLVHSNANTYLH
WYLQKPGQSPQLLIYKVSNRFSGVPDRFSGSGSGTDFTLKISRVEAEDVGVYYCSQNTH
VPPTFGQGTKLEIKRGGGGSGGGGSGGGGSQVQLVQSGAEVKKPGASVKVSCKASGYT
FTDYEMHWVRQAPGQGLEWMGALDPKTGDTAYSQKFKGRVTLTADESTSTAYMELSSL
RSEDTAVYYCTRFYSYTYWGQGTLVTVSSTTTPAPRPPTPAPTIASQPLSLRPEACRPAAG
GAVHTRGLDFACDIYIWAPLAGTCGVLLLSLVITLYCKRGRKKLLYIFKQPFMRPVQTTQE
EDGCSCRFPEEEEGGCELRVKFSRSADAPAYKQGQNQLYNELNLGRREEYDVLDKRRGR
DPEMGGKPRRKNPQEGLYNELQKDKMAEAYSEIGMKGERRRGKGHDGLYQGLSTATKD
TYDALHMQALPPRGSGATNFSLLKQAGDVEENPGPMALPVTALLLPLALLLHAARPSLF
NQEVQIPLTESYCGPCPKNWICYKNNCYQFFDESKNWYESQASCMSQNASLLKVYSKED
QDLLKLVKSYHWMGLVHIPTNGSWQWEDGSILSPNLLTIIEMQKGDCALYASSFKGYIEN
CSTPNTYICMQRTVSDPTRVETATETAWISLVTALHLVLGLSAVLGLLLLRWQFPAHYRRL
RHALWPSLPDLHRVLGQYLRDTAALSPPKATVSDTCEEVEPSLLEILPKSSERTPLPLARD
EVEGFLQDTFPQQLEESEKQRLGGDVQSPNCPSEDVVITPESFGRDSSLTCLAGNVSACD
APILSSSRSLDCRESGKNGPHVYQDLLLSLGTTNSTLPPPFSLQSGILTLNPVAQGQPILTSL
GSNQEEAYVTMSSFYQNQEKQASSFDFNGPYLGPPHSRSLPDILGQPEPPQEGGSQKSPPP
GSLEYLCLPAGGQVQLVPLAQDTEDPGVASGYVSSADLVFTPNSGASSVSGPPGAPGPVK
SGFEGYVELPPIEGRSPRSQPEGLLVLQQVGDYCFLPGLGPGPLSLRSKQVPVIQLFKALK
QQDYLSLPPWEVNKPGEVC
SEQ ID NO: 63 (BM NKG2D-IL12Rβ1-IL15Rα amino acid sequence)
MALPVTALLLPLALLLHAARPDVVMTQSPLSLPVTPGEPASISCRSSQSLVHSNANTYLH
WYLQKPGQSPQLLIYKVSNRFSGVPDRFSGSGSGTDFTLKISRVEAEDVGVYYCSQNTH
VPPTFGQGTKLEIKRGGGGSGGGGSGGGGSQVQLVQSGAEVKKPGASVKVSCKASGYT
FTDYEMHWVRQAPGQGLEWMGALDPKTGDTAYSQKFKGRVTLTADESTSTAYMELSSL
RSEDTAVYYCTRFYSYTYWGQGTLVTVSSTTTPAPRPPTPAPTIASQPLSLRPEACRPAAG
GAVHTRGLDFACDIYIWAPLAGTCGVLLLSLVITLYCKRGRKKLLYIFKQPFMRPVQTTQE
EDGCSCRFPEEEEGGCELRVKFSRSADAPAYKQGQNQLYNELNLGRREEYDVLDKRRGR
DPEMGGKPRRKNPQEGLYNELQKDKMAEAYSEIGMKGERRRGKGHDGLYQGLSTATKD
TYDALHMQALPPRGSGATNFSLLKQAGDVEENPGPMALPVTALLLPLALLLHAARPSLF
NQEVQIPLTESYCGPCPKNWICYKNNCYQFFDESKNWYESQASCMSQNASLLKVYSKED
QDLLKLVKSYHWMGLVHIPTNGSWQWEDGSILSPNLLTIIEMQKGDCALYASSFKGYIEN
CSTPNTYICMQRTVSDPTRVETATETAWISLVTALHLVLGLSAVLGLLLLRWQFPAHYRRL
RHALWPSLPDLHRVLGQYLRDTAALSPPKATVSDTCEEVEPSLLEILPKSSERTPLPLSLQE
ALVVEMSWDKGERTEPLEKTELPEGAPELALDTELSLEDGDRCKAKMKSRQTPPLASVE
MEAMEALPVTWGTSSRDEDLENCSHHL
SEQ ID NO: 64 (BM NKG2D-IL12Rβ1-IL15Rβ-1 amino acid sequence)
MALPVTALLLPLALLLHAARPDVVMTQSPLSLPVTPGEPASISCRSSQSLVHSNANTYLH
WYLQKPGQSPQLLIYKVSNRFSGVPDRFSGSGSGTDFTLKISRVEAEDVGVYYCSQNTH
VPPTFGQGTKLEIKRGGGGSGGGGSGGGGSQVQLVQSGAEVKKPGASVKVSCKASGYT
FTDYEMHWVRQAPGQGLEWMGALDPKTGDTAYSQKFKGRVTLTADESTSTAYMELSSL
RSEDTAVYYCTRFYSYTYWGQGTLVTVSSTTTPAPRPPTPAPTIASQPLSLRPEACRPAAG
GAVHTRGLDFACDIYIWAPLAGTCGVLLLSLVITLYCKRGRKKLLYIFKQPFMRPVQTTQE
EDGCSCRFPEEEEGGCELRVKFSRSADAPAYKQGQNQLYNELNLGRREEYDVLDKRRGR
DPEMGGKPRRKNPQEGLYNELQKDKMAEAYSEIGMKGERRRGKGHDGLYQGLSTATKD
TYDALHMQALPPRGSGATNFSLLKQAGDVEENPGPMALPVTALLLPLALLLHAARPSLF
NQEVQIPLTESYCGPCPKNWICYKNNCYQFFDESKNWYESQASCMSQNASLLKVYSKED
QDLLKLVKSYHWMGLVHIPTNGSWQWEDGSILSPNLLTIIEMQKGDCALYASSFKGYIEN
CSTPNTYICMQRTVSDPTRVETATETAWISLVTALHLVLGLSAVLGLLLLRWQFPAHYRRL
RHALWPSLPDLHRVLGQYLRDTAALSPPKATVSDTCEEVEPSLLEILPKSSERTPLPLSLQE
ALVVEMSWDKGERTEPLEKTELPEGAPELALDTELSLEDGDRCKAKMVTQLLLQQDKV
PEPASLSSNHSLTSCFTNQGYFFFHLPDALEIEACQVYFTYDPYSEEDPDEGVAGAPTGSSP
QPLQPLSGEDDAYCTFPSRDDLLLFSPSLLGGPSPPSTAPGGSGAGEERMPPSLQERVPRD
WDPQPLGPPTPGVPDLVDFQPPPELVLREAGEEVPDAGPREGVSFPWSRPPGQGEFRALN
ARLPLNTDAYLSLQELQGQDPTHLV
SEQ ID NO: 65 (BM NKG2D-IL12Rβ1-IL15Rβ-2 amino acid sequence)
MALPVTALLLPLALLLHAARPDVVMTQSPLSLPVTPGEPASISCRSSQSLVHSNANTYLH
WYLQKPGQSPQLLIYKVSNRFSGVPDRFSGSGSGTDFTLKISRVEAEDVGVYYCSQNTH
VPPTFGQGTKLEIKRGGGGSGGGGSGGGGSQVQLVQSGAEVKKPGASVKVSCKASGYT
FTDYEMHWVRQAPGQGLEWMGALDPKTGDTAYSQKFKGRVTLTADESTSTAYMELSSL
RSEDTAVYYCTRFYSYTYWGQGTLVTVSSTTTPAPRPPTPAPTIASQPLSLRPEACRPAAG
GAVHTRGLDFACDIYIWAPLAGTCGVLLLSLVITLYCKRGRKKLLYIFKQPFMRPVQTTQE
EDGCSCRFPEEEEGGCELRVKFSRSADAPAYKQGQNQLYNELNLGRREEYDVLDKRRGR
DPEMGGKPRRKNPQEGLYNELQKDKMAEAYSEIGMKGERRRGKGHDGLYQGLSTATKD
TYDALHMQALPPRGSGATNFSLLKQAGDVEENPGPMALPVTALLLPLALLLHAARPSLF
NQEVQIPLTESYCGPCPKNWICYKNNCYQFFDESKNWYESQASCMSQNASLLKVYSKED
QDLLKLVKSYHWMGLVHIPTNGSWQWEDGSILSPNLLTIIEMQKGDCALYASSFKGYIEN
CSTPNTYICMQRTVSDPTRVETATETAWISLVTALHLVLGLSAVLGLLLLRWQFPAHYRRL
RHALWPSLPDLHRVLGQYLRDTAALSPPKATVSDTCEEVEPSLLEILPKSSERTPLPLSLQE
ALVVEMSWDKGERTEPLEKTELPEGAPELALDTELSLEDGDRCKAKMEPASLSSNHSLTS
CFTNQGYFFFHLPDALEIEACQVYFTYDPYSEEDPDEGVAGAPTGSSPQPLQPLSGEDDA
YCTFPSRDDLLLFSEFRALNARLPLNTDAYLSLQELQGQDPTHLV
SEQ ID NO: 66 (BM NKG2D-IL12Rβ1-IL-21R-1 amino acid sequence)
MALPVTALLLPLALLLHAARPDVVMTQSPLSLPVTPGEPASISCRSSQSLVHSNANTYLH
WYLQKPGQSPQLLIYKVSNRFSGVPDRFSGSGSGTDFTLKISRVEAEDVGVYYCSQNTH
VPPTFGQGTKLEIKRGGGGSGGGGSGGGGSQVQLVQSGAEVKKPGASVKVSCKASGYT
FTDYEMHWVRQAPGQGLEWMGALDPKTGDTAYSQKFKGRVTLTADESTSTAYMELSSL
RSEDTAVYYCTRFYSYTYWGQGTLVTVSSTTTPAPRPPTPAPTIASQPLSLRPEACRPAAG
GAVHTRGLDFACDIYIWAPLAGTCGVLLLSLVITLYCKRGRKKLLYIFKQPFMRPVQTTQE
EDGCSCRFPEEEEGGCELRVKFSRSADAPAYKQGQNQLYNELNLGRREEYDVLDKRRGR
DPEMGGKPRRKNPQEGLYNELQKDKMAEAYSEIGMKGERRRGKGHDGLYQGLSTATKD
TYDALHMQALPPRGSGATNFSLLKQAGDVEENPGPMALPVTALLLPLALLLHAARPSLF
NQEVQIPLTESYCGPCPKNWICYKNNCYQFFDESKNWYESQASCMSQNASLLKVYSKED
QDLLKLVKSYHWMGLVHIPTNGSWQWEDGSILSPNLLTIIEMQKGDCALYASSFKGYIEN
CSTPNTYICMQRTVSDPTRVETATETAWISLVTALHLVLGLSAVLGLLLLRWQFPAHYRRL
RHALWPSLPDLHRVLGQYLRDTAALSPPKATVSDTCEEVEPSLLEILPKSSERTPLPLSLQE
ALVVEMSWDKGERTEPLEKTELPEGAPELALDTELSLEDGDRCKAKMLELGPWSPEVPS
TLEVYSCHPPRSPAKRLQLTELQEPAELVESDGVPKPSFWPTAQNSGGSAYSEERDRPYGL
VSIDTVTVLDAEGPCTWPCSCEDDGYPALDLDAGLEPS
SEQ ID NO: 67 (BM NKG2D-IL12Rβ1-IL-21R-2 amino acid sequence)
MALPVTALLLPLALLLHAARPDVVMTQSPLSLPVTPGEPASISCRSSQSLVHSNANTYLH
WYLQKPGQSPQLLIYKVSNRFSGVPDRFSGSGSGTDFTLKISRVEAEDVGVYYCSQNTH
VPPTFGQGTKLEIKRGGGGSGGGGSGGGGSQVQLVQSGAEVKKPGASVKVSCKASGYT
FTDYEMHWVRQAPGQGLEWMGALDPKTGDTAYSQKFKGRVTLTADESTSTAYMELSSL
RSEDTAVYYCTRFYSYTYWGQGTLVTVSSTTTPAPRPPTPAPTIASQPLSLRPEACRPAAG
GAVHTRGLDFACDIYIWAPLAGTCGVLLLSLVITLYCKRGRKKLLYIFKQPFMRPVQTTQE
EDGCSCRFPEEEEGGCELRVKFSRSADAPAYKQGQNQLYNELNLGRREEYDVLDKRRGR
DPEMGGKPRRKNPQEGLYNELQKDKMAEAYSEIGMKGERRRGKGHDGLYQGLSTATKD
TYDALHMQALPPRGSGATNFSLLKQAGDVEENPGPMALPVTALLLPLALLLHAARPSLF
NQEVQIPLTESYCGPCPKNWICYKNNCYQFFDESKNWYESQASCMSQNASLLKVYSKED
QDLLKLVKSYHWMGLVHIPTNGSWQWEDGSILSPNLLTIIEMQKGDCALYASSFKGYIEN
CSTPNTYICMQRTVSDPTRVETATETAWISLVTALHLVLGLSAVLGLLLLRWQFPAHYRRL
RHALWPSLPDLHRVLGQYLRDTAALSPPKATVSDTCEEVEPSLLEILPKSSERTPLPLSLQE
ALVVEMSWDKGERTEPLEKTELPEGAPELALDTELSLEDGDRCKAKMECDFTSPGDEGP
PRSYLRQWVVIPPPLSSPGPQAS
SEQ ID NO: 68 (BM NKG2D-IL12Rβ1-IL-21R-3 amino acid sequence)
MALPVTALLLPLALLLHAARPDVVMTQSPLSLPVTPGEPASISCRSSQSLVHSNANTYLH
WYLQKPGQSPQLLIYKVSNRFSGVPDRFSGSGSGTDFTLKISRVEAEDVGVYYCSQNTH
VPPTFGQGTKLEIKRGGGGSGGGGSGGGGSQVQLVQSGAEVKKPGASVKVSCKASGYT
FTDYEMHWVRQAPGQGLEWMGALDPKTGDTAYSQKFKGRVTLTADESTSTAYMELSSL
RSEDTAVYYCTRFYSYTYWGQGTLVTVSSTTTPAPRPPTPAPTIASQPLSLRPEACRPAAG
GAVHTRGLDFACDIYIWAPLAGTCGVLLLSLVITLYCKRGRKKLLYIFKQPFMRPVQTTQE
EDGCSCRFPEEEEGGCELRVKFSRSADAPAYKQGQNQLYNELNLGRREEYDVLDKRRGR
DPEMGGKPRRKNPQEGLYNELQKDKMAEAYSEIGMKGERRRGKGHDGLYQGLSTATKD
TYDALHMQALPPRGSGATNFSLLKQAGDVEENPGPMALPVTALLLPLALLLHAARPSLF
NQEVQIPLTESYCGPCPKNWICYKNNCYQFFDESKNWYESQASCMSQNASLLKVYSKED
QDLLKLVKSYHWMGLVHIPTNGSWQWEDGSILSPNLLTIIEMQKGDCALYASSFKGYIEN
CSTPNTYICMQRTVSDPTRVETATETAWISLVTALHLVLGLSAVLGLLLLRWQFPAHYRRL
RHALWPSLPDLHRVLGQYLRDTAALSPPKATVSDTCEEVEPSLLEILPKSSERTPLPLSLQE
ALVVEMSWDKGERTEPLEKTELPEGAPELALDTELSLEDGDRCKAKMLELGPWSPEVPS
TLEVYSCHPPRSPAKRLQLTELQEPAELVESDGVPKPSFWPTAQNSGGSAYSEERDRPYGL
VSIDTVTVLDAEGPCTWPCSCEDDGYPALDLDAGLEPSECDFTSPGDEGPPRSYLRQWV
VIPPPLSSPGPQAS
SEQ ID NO: 69 (BM NKG2D-IL12Rβ1-IL-23R-2 amino acid sequence)
MALPVTALLLPLALLLHAARPDVVMTQSPLSLPVTPGEPASISCRSSQSLVHSNANTYLH
WYLQKPGQSPQLLIYKVSNRFSGVPDRFSGSGSGTDFTLKISRVEAEDVGVYYCSQNTH
VPPTFGQGTKLEIKRGGGGSGGGGSGGGGSQVQLVQSGAEVKKPGASVKVSCKASGYT
FTDYEMHWVRQAPGQGLEWMGALDPKTGDTAYSQKFKGRVTLTADESTSTAYMELSSL
RSEDTAVYYCTRFYSYTYWGQGTLVTVSSTTTPAPRPPTPAPTIASQPLSLRPEACRPAAG
GAVHTRGLDFACDIYIWAPLAGTCGVLLLSLVITLYCKRGRKKLLYIFKQPFMRPVQTTQE
EDGCSCRFPEEEEGGCELRVKFSRSADAPAYKQGQNQLYNELNLGRREEYDVLDKRRGR
DPEMGGKPRRKNPQEGLYNELQKDKMAEAYSEIGMKGERRRGKGHDGLYQGLSTATKD
TYDALHMQALPPRGSGATNFSLLKQAGDVEENPGPMALPVTALLLPLALLLHAARPSLF
NQEVQIPLTESYCGPCPKNWICYKNNCYQFFDESKNWYESQASCMSQNASLLKVYSKED
QDLLKLVKSYHWMGLVHIPTNGSWQWEDGSILSPNLLTIIEMQKGDCALYASSFKGYIEN
CSTPNTYICMQRTVSDPTRVETATETAWISLVTALHLVLGLSAVLGLLLLRWQFPAHYRRL
RHALWPSLPDLHRVLGQYLRDTAALSPPKATVSDTCEEVEPSLLEILPKSSERTPLPLSLQE
ALVVEMSWDKGERTEPLEKTELPEGAPELALDTELSLEDGDRCKAKMEFVSCLGIVNEE
LPSINTYFPQNILESHENRIS
SEQ ID NO: 70 (BM NKG2D-IL12Rβ1-GM-CSFRα amino acid sequence)
MALPVTALLLPLALLLHAARPDVVMTQSPLSLPVTPGEPASISCRSSQSLVHSNANTYLH
WYLQKPGQSPQLLIYKVSNRFSGVPDRFSGSGSGTDFTLKISRVEAEDVGVYYCSQNTH
VPPTFGQGTKLEIKRGGGGSGGGGSGGGGSQVQLVQSGAEVKKPGASVKVSCKASGYT
FTDYEMHWVRQAPGQGLEWMGALDPKTGDTAYSQKFKGRVTLTADESTSTAYMELSSL
RSEDTAVYYCTRFYSYTYWGQGTLVTVSSTTTPAPRPPTPAPTIASQPLSLRPEACRPAAG
GAVHTRGLDFACDIYIWAPLAGTCGVLLLSLVITLYCKRGRKKLLYIFKQPFMRPVQTTQE
EDGCSCRFPEEEEGGCELRVKFSRSADAPAYKQGQNQLYNELNLGRREEYDVLDKRRGR
DPEMGGKPRRKNPQEGLYNELQKDKMAEAYSEIGMKGERRRGKGHDGLYQGLSTATKD
TYDALHMQALPPRGSGATNFSLLKQAGDVEENPGPMALPVTALLLPLALLLHAARPSLF
NQEVQIPLTESYCGPCPKNWICYKNNCYQFFDESKNWYESQASCMSQNASLLKVYSKED
QDLLKLVKSYHWMGLVHIPTNGSWQWEDGSILSPNLLTIIEMQKGDCALYASSFKGYIEN
CSTPNTYICMQRTVSDPTRVETATETAWISLVTALHLVLGLSAVLGLLLLRWQFPAHYRRL
RHALWPSLPDLHRVLGQYLRDTAALSPPKATVSDTCEEVEPSLLEILPKSSERTPLPLSLQE
ALVVEMSWDKGERTEPLEKTELPEGAPELALDTELSLEDGDRCKAKMEVEDEIIWEEFTP
EEGKGYREEVLTVKEIT
SEQ ID NO: 71 (BM NKG2D-IL12Rβ1-GM-CSFRβ-1 amino acid sequence)
MALPVTALLLPLALLLHAARPDVVMTQSPLSLPVTPGEPASISCRSSQSLVHSNANTYLH
WYLQKPGQSPQLLIYKVSNRFSGVPDRFSGSGSGTDFTLKISRVEAEDVGVYYCSQNTH
VPPTFGQGTKLEIKRGGGGSGGGGSGGGGSQVQLVQSGAEVKKPGASVKVSCKASGYT
FTDYEMHWVRQAPGQGLEWMGALDPKTGDTAYSQKFKGRVTLTADESTSTAYMELSSL
RSEDTAVYYCTRFYSYTYWGQGTLVTVSSTTTPAPRPPTPAPTIASQPLSLRPEACRPAAG
GAVHTRGLDFACDIYIWAPLAGTCGVLLLSLVITLYCKRGRKKLLYIFKQPFMRPVQTTQE
EDGCSCRFPEEEEGGCELRVKFSRSADAPAYKQGQNQLYNELNLGRREEYDVLDKRRGR
DPEMGGKPRRKNPQEGLYNELQKDKMAEAYSEIGMKGERRRGKGHDGLYQGLSTATKD
TYDALHMQALPPRGSGATNFSLLKQAGDVEENPGPMALPVTALLLPLALLLHAARPSLF
NQEVQIPLTESYCGPCPKNWICYKNNCYQFFDESKNWYESQASCMSQNASLLKVYSKED
QDLLKLVKSYHWMGLVHIPTNGSWQWEDGSILSPNLLTIIEMQKGDCALYASSFKGYIEN
CSTPNTYICMQRTVSDPTRVETATETAWISLVTALHLVLGLSAVLGLLLLRWQFPAHYRRL
RHALWPSLPDLHRVLGQYLRDTAALSPPKATVSDTCEEVEPSLLEILPKSSERTPLPLSLQE
ALVVEMSWDKGERTEPLEKTELPEGAPELALDTELSLEDGDRCKAKMDTEDPGVASGY
VSSADLVFTPNSGASSVSGPPGAPGPVKSGFEGYVELPPIEGRSPRSQPEGLLVLQQVGDY
CFLPGLGPGPLSLRSKQVPVIQLFKALKQQDYLSLPPWEVNKPGEVC
SEQ ID NO: 72 (BM NKG2D-IL12Rβ1-GM-CSFRβ-2 amino acid sequence)
MALPVTALLLPLALLLHAARPDVVMTQSPLSLPVTPGEPASISCRSSQSLVHSNANTYLH
WYLQKPGQSPQLLIYKVSNRFSGVPDRFSGSGSGTDFTLKISRVEAEDVGVYYCSQNTH
VPPTFGQGTKLEIKRGGGGSGGGGSGGGGSQVQLVQSGAEVKKPGASVKVSCKASGYT
FTDYEMHWVRQAPGQGLEWMGALDPKTGDTAYSQKFKGRVTLTADESTSTAYMELSSL
RSEDTAVYYCTRFYSYTYWGQGTLVTVSSTTTPAPRPPTPAPTIASQPLSLRPEACRPAAG
GAVHTRGLDFACDIYIWAPLAGTCGVLLLSLVITLYCKRGRKKLLYIFKQPFMRPVQTTQE
EDGCSCRFPEEEEGGCELRVKFSRSADAPAYKQGQNQLYNELNLGRREEYDVLDKRRGR
DPEMGGKPRRKNPQEGLYNELQKDKMAEAYSEIGMKGERRRGKGHDGLYQGLSTATKD
TYDALHMQALPPRGSGATNFSLLKQAGDVEENPGPMALPVTALLLPLALLLHAARPSLF
NQEVQIPLTESYCGPCPKNWICYKNNCYQFFDESKNWYESQASCMSQNASLLKVYSKED
QDLLKLVKSYHWMGLVHIPTNGSWQWEDGSILSPNLLTIIEMQKGDCALYASSFKGYIEN
CSTPNTYICMQRTVSDPTRVETATETAWISLVTALHLVLGLSAVLGLLLLRWQFPAHYRRL
RHALWPSLPDLHRVLGQYLRDTAALSPPKATVSDTCEEVEPSLLEILPKSSERTPLPLSLQE
ALVVEMSWDKGERTEPLEKTELPEGAPELALDTELSLEDGDRCKAKMEKQASSFDFNGP
YLGPPHSRSLPDILGQPEPPQEGGSQKSPPPGSLEYLCLPAGGQVQLVPLAQDTEDPGVAS
GYVSSADLVFTPNSGASSVSGPPGAPGPVKSGFEGYVELPPIEGRSPRSQPEGLLVLQQVG
DYCFLPGLGPGPLSLRSKQVPVIQLFKALKQQDYLSLPPWEVNKPGEVC
SEQ ID NO: 73 (BM NKG2D-IL12Rβ2-IL15Rα amino acid sequence)
MALPVTALLLPLALLLHAARPDVVMTQSPLSLPVTPGEPASISCRSSQSLVHSNANTYLH
WYLQKPGQSPQLLIYKVSNRFSGVPDRFSGSGSGTDFTLKISRVEAEDVGVYYCSQNTH
VPPTFGQGTKLEIKRGGGGSGGGGSGGGGSQVQLVQSGAEVKKPGASVKVSCKASGYT
FTDYEMHWVRQAPGQGLEWMGALDPKTGDTAYSQKFKGRVTLTADESTSTAYMELSSL
RSEDTAVYYCTRFYSYTYWGQGTLVTVSSTTTPAPRPPTPAPTIASQPLSLRPEACRPAAG
GAVHTRGLDFACDIYIWAPLAGTCGVLLLSLVITLYCKRGRKKLLYIFKQPFMRPVQTTQE
EDGCSCRFPEEEEGGCELRVKFSRSADAPAYKQGQNQLYNELNLGRREEYDVLDKRRGR
DPEMGGKPRRKNPQEGLYNELQKDKMAEAYSEIGMKGERRRGKGHDGLYQGLSTATKD
TYDALHMQALPPRGSGATNFSLLKQAGDVEENPGPMALPVTALLLPLALLLHAARPSLF
NQEVQIPLTESYCGPCPKNWICYKNNCYQFFDESKNWYESQASCMSQNASLLKVYSKED
QDLLKLVKSYHWMGLVHIPTNGSWQWEDGSILSPNLLTIIEMQKGDCALYASSFKGYIEN
CSTPNTYICMQRTVSDPTRVETATETAWISLVTALHLVLGLSAVLGLLLLRWQFPAHYRRL
RHALWPSLPDLHRVLGQYLRDTAALSPPKATVSDTCEEVEPSLLEILPKSSERTPLPLSDPK
PENPACPWTVLPAGDLPTHDGYLPSNIDDLPSHEAPLADSLEELEPQKSRQTPPLASVEME
AMEALPVTWGTSSRDEDLENCSHHL
SEQ ID NO: 74 (BM NKG2D-IL12Rβ2-IL15Rβ-1 amino acid sequence)
MALPVTALLLPLALLLHAARPDVVMTQSPLSLPVTPGEPASISCRSSQSLVHSNANTYLH
WYLQKPGQSPQLLIYKVSNRFSGVPDRFSGSGSGTDFTLKISRVEAEDVGVYYCSQNTH
VPPTFGQGTKLEIKRGGGGSGGGGSGGGGSQVQLVQSGAEVKKPGASVKVSCKASGYT
FTDYEMHWVRQAPGQGLEWMGALDPKTGDTAYSQKFKGRVTLTADESTSTAYMELSSL
RSEDTAVYYCTRFYSYTYWGQGTLVTVSSTTTPAPRPPTPAPTIASQPLSLRPEACRPAAG
GAVHTRGLDFACDIYIWAPLAGTCGVLLLSLVITLYCKRGRKKLLYIFKQPFMRPVQTTQE
EDGCSCRFPEEEEGGCELRVKFSRSADAPAYKQGQNQLYNELNLGRREEYDVLDKRRGR
DPEMGGKPRRKNPQEGLYNELQKDKMAEAYSEIGMKGERRRGKGHDGLYQGLSTATKD
TYDALHMQALPPRGSGATNFSLLKQAGDVEENPGPMALPVTALLLPLALLLHAARPSLF
NQEVQIPLTESYCGPCPKNWICYKNNCYQFFDESKNWYESQASCMSQNASLLKVYSKED
QDLLKLVKSYHWMGLVHIPTNGSWQWEDGSILSPNLLTIIEMQKGDCALYASSFKGYIEN
CSTPNTYICMQRTVSDPTRVETATETAWISLVTALHLVLGLSAVLGLLLLRWQFPAHYRRL
RHALWPSLPDLHRVLGQYLRDTAALSPPKATVSDTCEEVEPSLLEILPKSSERTPLPLSDPK
PENPACPWTVLPAGDLPTHDGYLPSNIDDLPSHEAPLADSLEELEPQVTQLLLQQDKVPE
PASLSSNHSLTSCFTNQGYFFFHLPDALEIEACQVYFTYDPYSEEDPDEGVAGAPTGSSPQ
PLQPLSGEDDAYCTFPSRDDLLLFSPSLLGGPSPPSTAPGGSGAGEERMPPSLQERVPRDW
DPQPLGPPTPGVPDLVDFQPPPELVLREAGEEVPDAGPREGVSFPWSRPPGQGEFRALNA
RLPLNTDAYLSLQELQGQDPTHLV
SEQ ID NO: 75 (BM NKG2D-IL12Rβ2-IL15Rβ-2 amino acid sequence)
MALPVTALLLPLALLLHAARPDVVMTQSPLSLPVTPGEPASISCRSSQSLVHSNANTYLH
WYLQKPGQSPQLLIYKVSNRFSGVPDRFSGSGSGTDFTLKISRVEAEDVGVYYCSQNTH
VPPTFGQGTKLEIKRGGGGSGGGGSGGGGSQVQLVQSGAEVKKPGASVKVSCKASGYT
FTDYEMHWVRQAPGQGLEWMGALDPKTGDTAYSQKFKGRVTLTADESTSTAYMELSSL
RSEDTAVYYCTRFYSYTYWGQGTLVTVSSTTTPAPRPPTPAPTIASQPLSLRPEACRPAAG
GAVHTRGLDFACDIYIWAPLAGTCGVLLLSLVITLYCKRGRKKLLYIFKQPFMRPVQTTQE
EDGCSCRFPEEEEGGCELRVKFSRSADAPAYKQGQNQLYNELNLGRREEYDVLDKRRGR
DPEMGGKPRRKNPQEGLYNELQKDKMAEAYSEIGMKGERRRGKGHDGLYQGLSTATKD
TYDALHMQALPPRGSGATNFSLLKQAGDVEENPGPMALPVTALLLPLALLLHAARPSLF
NQEVQIPLTESYCGPCPKNWICYKNNCYQFFDESKNWYESQASCMSQNASLLKVYSKED
QDLLKLVKSYHWMGLVHIPTNGSWQWEDGSILSPNLLTIIEMQKGDCALYASSFKGYIEN
CSTPNTYICMQRTVSDPTRVETATETAWISLVTALHLVLGLSAVLGLLLLRWQFPAHYRRL
RHALWPSLPDLHRVLGQYLRDTAALSPPKATVSDTCEEVEPSLLEILPKSSERTPLPLSDPK
PENPACPWTVLPAGDLPTHDGYLPSNIDDLPSHEAPLADSLEELEPQEPASLSSNHSLTSCF
TNQGYFFFHLPDALEIEACQVYFTYDPYSEEDPDEGVAGAPTGSSPQPLQPLSGEDDAYC
TFPSRDDLLLFSEFRALNARLPLNTDAYLSLQELQGQDPTHLV
SEQ ID NO: 76 (BM NKG2D-IL12Rβ2-IL-21R-1 amino acid sequence)
MALPVTALLLPLALLLHAARPDVVMTQSPLSLPVTPGEPASISCRSSQSLVHSNANTYLH
WYLQKPGQSPQLLIYKVSNRFSGVPDRFSGSGSGTDFTLKISRVEAEDVGVYYCSQNTH
VPPTFGQGTKLEIKRGGGGSGGGGSGGGGSQVQLVQSGAEVKKPGASVKVSCKASGYT
FTDYEMHWVRQAPGQGLEWMGALDPKTGDTAYSQKFKGRVTLTADESTSTAYMELSSL
RSEDTAVYYCTRFYSYTYWGQGTLVTVSSTTTPAPRPPTPAPTIASQPLSLRPEACRPAAG
GAVHTRGLDFACDIYIWAPLAGTCGVLLLSLVITLYCKRGRKKLLYIFKQPFMRPVQTTQE
EDGCSCRFPEEEEGGCELRVKFSRSADAPAYKQGQNQLYNELNLGRREEYDVLDKRRGR
DPEMGGKPRRKNPQEGLYNELQKDKMAEAYSEIGMKGERRRGKGHDGLYQGLSTATKD
TYDALHMQALPPRGSGATNFSLLKQAGDVEENPGPMALPVTALLLPLALLLHAARPSLF
NQEVQIPLTESYCGPCPKNWICYKNNCYQFFDESKNWYESQASCMSQNASLLKVYSKED
QDLLKLVKSYHWMGLVHIPTNGSWQWEDGSILSPNLLTIIEMQKGDCALYASSFKGYIEN
CSTPNTYICMQRTVSDPTRVETATETAWISLVTALHLVLGLSAVLGLLLLRWQFPAHYRRL
RHALWPSLPDLHRVLGQYLRDTAALSPPKATVSDTCEEVEPSLLEILPKSSERTPLPLSDPK
PENPACPWTVLPAGDLPTHDGYLPSNIDDLPSHEAPLADSLEELEPQLELGPWSPEVPSTL
EVYSCHPPRSPAKRLQLTELQEPAELVESDGVPKPSFWPTAQNSGGSAYSEERDRPYGLVS
IDTVTVLDAEGPCTWPCSCEDDGYPALDLDAGLEPS
SEQ ID NO: 77 (BM NKG2D-IL12Rβ2-IL-21R-2 amino acid sequence)
MALPVTALLLPLALLLHAARPDVVMTQSPLSLPVTPGEPASISCRSSQSLVHSNANTYLH
WYLQKPGQSPQLLIYKVSNRFSGVPDRFSGSGSGTDFTLKISRVEAEDVGVYYCSQNTH
VPPTFGQGTKLEIKRGGGGSGGGGSGGGGSQVQLVQSGAEVKKPGASVKVSCKASGYT
FTDYEMHWVRQAPGQGLEWMGALDPKTGDTAYSQKFKGRVTLTADESTSTAYMELSSL
RSEDTAVYYCTRFYSYTYWGQGTLVTVSSTTTPAPRPPTPAPTIASQPLSLRPEACRPAAG
GAVHTRGLDFACDIYIWAPLAGTCGVLLLSLVITLYCKRGRKKLLYIFKQPFMRPVQTTQE
EDGCSCRFPEEEEGGCELRVKFSRSADAPAYKQGQNQLYNELNLGRREEYDVLDKRRGR
DPEMGGKPRRKNPQEGLYNELQKDKMAEAYSEIGMKGERRRGKGHDGLYQGLSTATKD
TYDALHMQALPPRGSGATNFSLLKQAGDVEENPGPMALPVTALLLPLALLLHAARPSLF
NQEVQIPLTESYCGPCPKNWICYKNNCYQFFDESKNWYESQASCMSQNASLLKVYSKED
QDLLKLVKSYHWMGLVHIPTNGSWQWEDGSILSPNLLTIIEMQKGDCALYASSFKGYIEN
CSTPNTYICMQRTVSDPTRVETATETAWISLVTALHLVLGLSAVLGLLLLRWQFPAHYRRL
RHALWPSLPDLHRVLGQYLRDTAALSPPKATVSDTCEEVEPSLLEILPKSSERTPLPLSDPK
PENPACPWTVLPAGDLPTHDGYLPSNIDDLPSHEAPLADSLEELEPQECDFTSPGDEGPPR
SYLRQWVVIPPPLSSPGPQAS
SEQ ID NO: 78 (BM NKG2D-IL12Rβ2-IL-21R-3 amino acid sequence)
MALPVTALLLPLALLLHAARPDVVMTQSPLSLPVTPGEPASISCRSSQSLVHSNANTYLH
WYLQKPGQSPQLLIYKVSNRFSGVPDRFSGSGSGTDFTLKISRVEAEDVGVYYCSQNTH
VPPTFGQGTKLEIKRGGGGSGGGGSGGGGSQVQLVQSGAEVKKPGASVKVSCKASGYT
FTDYEMHWVRQAPGQGLEWMGALDPKTGDTAYSQKFKGRVTLTADESTSTAYMELSSL
RSEDTAVYYCTRFYSYTYWGQGTLVTVSSTTTPAPRPPTPAPTIASQPLSLRPEACRPAAG
GAVHTRGLDFACDIYIWAPLAGTCGVLLLSLVITLYCKRGRKKLLYIFKQPFMRPVQTTQE
EDGCSCRFPEEEEGGCELRVKFSRSADAPAYKQGQNQLYNELNLGRREEYDVLDKRRGR
DPEMGGKPRRKNPQEGLYNELQKDKMAEAYSEIGMKGERRRGKGHDGLYQGLSTATKD
TYDALHMQALPPRGSGATNFSLLKQAGDVEENPGPMALPVTALLLPLALLLHAARPSLF
NQEVQIPLTESYCGPCPKNWICYKNNCYQFFDESKNWYESQASCMSQNASLLKVYSKED
QDLLKLVKSYHWMGLVHIPTNGSWQWEDGSILSPNLLTIIEMQKGDCALYASSFKGYIEN
CSTPNTYICMQRTVSDPTRVETATETAWISLVTALHLVLGLSAVLGLLLLRWQFPAHYRRL
RHALWPSLPDLHRVLGQYLRDTAALSPPKATVSDTCEEVEPSLLEILPKSSERTPLPLSDPK
PENPACPWTVLPAGDLPTHDGYLPSNIDDLPSHEAPLADSLEELEPQLELGPWSPEVPSTL
EVYSCHPPRSPAKRLQLTELQEPAELVESDGVPKPSFWPTAQNSGGSAYSEERDRPYGLVS
IDTVTVLDAEGPCTWPCSCEDDGYPALDLDAGLEPSECDFTSPGDEGPPRSYLRQWVVIP
PPLSSPGPQAS
SEQ ID NO: 79 (BM NKG2D-IL12Rβ2-IL-23R-2 amino acid sequence)
MALPVTALLLPLALLLHAARPDVVMTQSPLSLPVTPGEPASISCRSSQSLVHSNANTYLH
WYLQKPGQSPQLLIYKVSNRFSGVPDRFSGSGSGTDFTLKISRVEAEDVGVYYCSQNTH
VPPTFGQGTKLEIKRGGGGSGGGGSGGGGSQVQLVQSGAEVKKPGASVKVSCKASGYT
FTDYEMHWVRQAPGQGLEWMGALDPKTGDTAYSQKFKGRVTLTADESTSTAYMELSSL
RSEDTAVYYCTRFYSYTYWGQGTLVTVSSTTTPAPRPPTPAPTIASQPLSLRPEACRPAAG
GAVHTRGLDFACDIYIWAPLAGTCGVLLLSLVITLYCKRGRKKLLYIFKQPFMRPVQTTQE
EDGCSCRFPEEEEGGCELRVKFSRSADAPAYKQGQNQLYNELNLGRREEYDVLDKRRGR
DPEMGGKPRRKNPQEGLYNELQKDKMAEAYSEIGMKGERRRGKGHDGLYQGLSTATKD
TYDALHMQALPPRGSGATNFSLLKQAGDVEENPGPMALPVTALLLPLALLLHAARPSLF
NQEVQIPLTESYCGPCPKNWICYKNNCYQFFDESKNWYESQASCMSQNASLLKVYSKED
QDLLKLVKSYHWMGLVHIPTNGSWQWEDGSILSPNLLTIIEMQKGDCALYASSFKGYIEN
CSTPNTYICMQRTVSDPTRVETATETAWISLVTALHLVLGLSAVLGLLLLRWQFPAHYRRL
RHALWPSLPDLHRVLGQYLRDTAALSPPKATVSDTCEEVEPSLLEILPKSSERTPLPLSDPK
PENPACPWTVLPAGDLPTHDGYLPSNIDDLPSHEAPLADSLEELEPQEFVSCLGIVNEELP
SINTYFPQNILESHENRIS
SEQ ID NO: 80 (BM NKG2D-IL12Rβ2-GM-CSFRα amino acid sequence)
MALPVTALLLPLALLLHAARPDVVMTQSPLSLPVTPGEPASISCRSSQSLVHSNANTYLH
WYLQKPGQSPQLLIYKVSNRFSGVPDRFSGSGSGTDFTLKISRVEAEDVGVYYCSQNTH
VPPTFGQGTKLEIKRGGGGSGGGGSGGGGSQVQLVQSGAEVKKPGASVKVSCKASGYT
FTDYEMHWVRQAPGQGLEWMGALDPKTGDTAYSQKFKGRVTLTADESTSTAYMELSSL
RSEDTAVYYCTRFYSYTYWGQGTLVTVSSTTTPAPRPPTPAPTIASQPLSLRPEACRPAAG
GAVHTRGLDFACDIYIWAPLAGTCGVLLLSLVITLYCKRGRKKLLYIFKQPFMRPVQTTQE
EDGCSCRFPEEEEGGCELRVKFSRSADAPAYKQGQNQLYNELNLGRREEYDVLDKRRGR
DPEMGGKPRRKNPQEGLYNELQKDKMAEAYSEIGMKGERRRGKGHDGLYQGLSTATKD
TYDALHMQALPPRGSGATNFSLLKQAGDVEENPGPMALPVTALLLPLALLLHAARPSLF
NQEVQIPLTESYCGPCPKNWICYKNNCYQFFDESKNWYESQASCMSQNASLLKVYSKED
QDLLKLVKSYHWMGLVHIPTNGSWQWEDGSILSPNLLTIIEMQKGDCALYASSFKGYIEN
CSTPNTYICMQRTVSDPTRVETATETAWISLVTALHLVLGLSAVLGLLLLRWQFPAHYRRL
RHALWPSLPDLHRVLGQYLRDTAALSPPKATVSDTCEEVEPSLLEILPKSSERTPLPLSDPK
PENPACPWTVLPAGDLPTHDGYLPSNIDDLPSHEAPLADSLEELEPQEVEDEIIWEEFTPEE
GKGYREEVLTVKEIT
SEQ ID NO: 81 (BM NKG2D-IL12Rβ2-GM-CSFRβ-1 amino acid sequence)
MALPVTALLLPLALLLHAARPDVVMTQSPLSLPVTPGEPASISCRSSQSLVHSNANTYLH
WYLQKPGQSPQLLIYKVSNRFSGVPDRFSGSGSGTDFTLKISRVEAEDVGVYYCSQNTH
VPPTFGQGTKLEIKRGGGGSGGGGSGGGGSQVQLVQSGAEVKKPGASVKVSCKASGYT
FTDYEMHWVRQAPGQGLEWMGALDPKTGDTAYSQKFKGRVTLTADESTSTAYMELSSL
RSEDTAVYYCTRFYSYTYWGQGTLVTVSSTTTPAPRPPTPAPTIASQPLSLRPEACRPAAG
GAVHTRGLDFACDIYIWAPLAGTCGVLLLSLVITLYCKRGRKKLLYIFKQPFMRPVQTTQE
EDGCSCRFPEEEEGGCELRVKFSRSADAPAYKQGQNQLYNELNLGRREEYDVLDKRRGR
DPEMGGKPRRKNPQEGLYNELQKDKMAEAYSEIGMKGERRRGKGHDGLYQGLSTATKD
TYDALHMQALPPRGSGATNFSLLKQAGDVEENPGPMALPVTALLLPLALLLHAARPSLF
NQEVQIPLTESYCGPCPKNWICYKNNCYQFFDESKNWYESQASCMSQNASLLKVYSKED
QDLLKLVKSYHWMGLVHIPTNGSWQWEDGSILSPNLLTIIEMQKGDCALYASSFKGYIEN
CSTPNTYICMQRTVSDPTRVETATETAWISLVTALHLVLGLSAVLGLLLLRWQFPAHYRRL
RHALWPSLPDLHRVLGQYLRDTAALSPPKATVSDTCEEVEPSLLEILPKSSERTPLPLSDPK
PENPACPWTVLPAGDLPTHDGYLPSNIDDLPSHEAPLADSLEELEPQDTEDPGVASGYVSS
ADLVFTPNSGASSVSGPPGAPGPVKSGFEGYVELPPIEGRSPRSQPEGLLVLQQVGDYCFL
PGLGPGPLSLRSKQVPVIQLFKALKQQDYLSLPPWEVNKPGEVC
SEQ ID NO: 82 (BM NKG2D-IL12Rβ2-GM-CSFRβ-2 amino acid sequence)
MALPVTALLLPLALLLHAARPDVVMTQSPLSLPVTPGEPASISCRSSQSLVHSNANTYLH
WYLQKPGQSPQLLIYKVSNRFSGVPDRFSGSGSGTDFTLKISRVEAEDVGVYYCSQNTH
VPPTFGQGTKLEIKRGGGGSGGGGSGGGGSQVQLVQSGAEVKKPGASVKVSCKASGYT
FTDYEMHWVRQAPGQGLEWMGALDPKTGDTAYSQKFKGRVTLTADESTSTAYMELSSL
RSEDTAVYYCTRFYSYTYWGQGTLVTVSSTTTPAPRPPTPAPTIASQPLSLRPEACRPAAG
GAVHTRGLDFACDIYIWAPLAGTCGVLLLSLVITLYCKRGRKKLLYIFKQPFMRPVQTTQE
EDGCSCRFPEEEEGGCELRVKFSRSADAPAYKQGQNQLYNELNLGRREEYDVLDKRRGR
DPEMGGKPRRKNPQEGLYNELQKDKMAEAYSEIGMKGERRRGKGHDGLYQGLSTATKD
TYDALHMQALPPRGSGATNFSLLKQAGDVEENPGPMALPVTALLLPLALLLHAARPSLF
NQEVQIPLTESYCGPCPKNWICYKNNCYQFFDESKNWYESQASCMSQNASLLKVYSKED
QDLLKLVKSYHWMGLVHIPTNGSWQWEDGSILSPNLLTIIEMQKGDCALYASSFKGYIEN
CSTPNTYICMQRTVSDPTRVETATETAWISLVTALHLVLGLSAVLGLLLLRWQFPAHYRRL
RHALWPSLPDLHRVLGQYLRDTAALSPPKATVSDTCEEVEPSLLEILPKSSERTPLPLSDPK
PENPACPWTVLPAGDLPTHDGYLPSNIDDLPSHEAPLADSLEELEPQEKQASSFDFNGPYL
GPPHSRSLPDILGQPEPPQEGGSQKSPPPGSLEYLCLPAGGQVQLVPLAQDTEDPGVASGY
VSSADLVFTPNSGASSVSGPPGAPGPVKSGFEGYVELPPIEGRSPRSQPEGLLVLQQVGDY
CFLPGLGPGPLSLRSKQVPVIQLFKALKQQDYLSLPPWEVNKPGEVC
SEQ ID NO: 83 (BM NKG2D-IL15Rα-IL-21R-1 amino acid sequence)
MALPVTALLLPLALLLHAARPDVVMTQSPLSLPVTPGEPASISCRSSQSLVHSNANTYLH
WYLQKPGQSPQLLIYKVSNRFSGVPDRFSGSGSGTDFTLKISRVEAEDVGVYYCSQNTH
VPPTFGQGTKLEIKRGGGGSGGGGSGGGGSQVQLVQSGAEVKKPGASVKVSCKASGYT
FTDYEMHWVRQAPGQGLEWMGALDPKTGDTAYSQKFKGRVTLTADESTSTAYMELSSL
RSEDTAVYYCTRFYSYTYWGQGTLVTVSSTTTPAPRPPTPAPTIASQPLSLRPEACRPAAG
GAVHTRGLDFACDIYIWAPLAGTCGVLLLSLVITLYCKRGRKKLLYIFKQPFMRPVQTTQE
EDGCSCRFPEEEEGGCELRVKFSRSADAPAYKQGQNQLYNELNLGRREEYDVLDKRRGR
DPEMGGKPRRKNPQEGLYNELQKDKMAEAYSEIGMKGERRRGKGHDGLYQGLSTATKD
TYDALHMQALPPRGSGATNFSLLKQAGDVEENPGPMALPVTALLLPLALLLHAARPSLF
NQEVQIPLTESYCGPCPKNWICYKNNCYQFFDESKNWYESQASCMSQNASLLKVYSKED
QDLLKLVKSYHWMGLVHIPTNGSWQWEDGSILSPNLLTIIEMQKGDCALYASSFKGYIEN
CSTPNTYICMQRTVSDPTRVETATETAWISLVTALHLVLGLSAVLGLLLLRWQFPAHYRRL
RHALWPSLPDLHRVLGQYLRDTAALSPPKATVSDTCEEVEPSLLEILPKSSERTPLPLKSR
QTPPLASVEMEAMEALPVTWGTSSRDEDLENCSHHLLELGPWSPEVPSTLEVYSCHPPR
SPAKRLQLTELQEPAELVESDGVPKPSFWPTAQNSGGSAYSEERDRPYGLVSIDTVTVLDA
EGPCTWPCSCEDDGYPALDLDAGLEPS
SEQ ID NO: 84 (BM NKG2D-IL15Rα-IL-21R-2 amino acid sequence)
MALPVTALLLPLALLLHAARPDVVMTQSPLSLPVTPGEPASISCRSSQSLVHSNANTYLH
WYLQKPGQSPQLLIYKVSNRFSGVPDRFSGSGSGTDFTLKISRVEAEDVGVYYCSQNTH
VPPTFGQGTKLEIKRGGGGSGGGGSGGGGSQVQLVQSGAEVKKPGASVKVSCKASGYT
FTDYEMHWVRQAPGQGLEWMGALDPKTGDTAYSQKFKGRVTLTADESTSTAYMELSSL
RSEDTAVYYCTRFYSYTYWGQGTLVTVSSTTTPAPRPPTPAPTIASQPLSLRPEACRPAAG
GAVHTRGLDFACDIYIWAPLAGTCGVLLLSLVITLYCKRGRKKLLYIFKQPFMRPVQTTQE
EDGCSCRFPEEEEGGCELRVKFSRSADAPAYKQGQNQLYNELNLGRREEYDVLDKRRGR
DPEMGGKPRRKNPQEGLYNELQKDKMAEAYSEIGMKGERRRGKGHDGLYQGLSTATKD
TYDALHMQALPPRGSGATNFSLLKQAGDVEENPGPMALPVTALLLPLALLLHAARPSLF
NQEVQIPLTESYCGPCPKNWICYKNNCYQFFDESKNWYESQASCMSQNASLLKVYSKED
QDLLKLVKSYHWMGLVHIPTNGSWQWEDGSILSPNLLTIIEMQKGDCALYASSFKGYIEN
CSTPNTYICMQRTVSDPTRVETATETAWISLVTALHLVLGLSAVLGLLLLRWQFPAHYRRL
RHALWPSLPDLHRVLGQYLRDTAALSPPKATVSDTCEEVEPSLLEILPKSSERTPLPLKSR
QTPPLASVEMEAMEALPVTWGTSSRDEDLENCSHHLECDFTSPGDEGPPRSYLRQWVVI
PPPLSSPGPQAS
SEQ ID NO: 85 (BM NKG2D-IL15Rα-IL-21R-3 amino acid sequence)
MALPVTALLLPLALLLHAARPDVVMTQSPLSLPVTPGEPASISCRSSQSLVHSNANTYLH
WYLQKPGQSPQLLIYKVSNRFSGVPDRFSGSGSGTDFTLKISRVEAEDVGVYYCSQNTH
VPPTFGQGTKLEIKRGGGGSGGGGSGGGGSQVQLVQSGAEVKKPGASVKVSCKASGYT
FTDYEMHWVRQAPGQGLEWMGALDPKTGDTAYSQKFKGRVTLTADESTSTAYMELSSL
RSEDTAVYYCTRFYSYTYWGQGTLVTVSSTTTPAPRPPTPAPTIASQPLSLRPEACRPAAG
GAVHTRGLDFACDIYIWAPLAGTCGVLLLSLVITLYCKRGRKKLLYIFKQPFMRPVQTTQE
EDGCSCRFPEEEEGGCELRVKFSRSADAPAYKQGQNQLYNELNLGRREEYDVLDKRRGR
DPEMGGKPRRKNPQEGLYNELQKDKMAEAYSEIGMKGERRRGKGHDGLYQGLSTATKD
TYDALHMQALPPRGSGATNFSLLKQAGDVEENPGPMALPVTALLLPLALLLHAARPSLF
NQEVQIPLTESYCGPCPKNWICYKNNCYQFFDESKNWYESQASCMSQNASLLKVYSKED
QDLLKLVKSYHWMGLVHIPTNGSWQWEDGSILSPNLLTIIEMQKGDCALYASSFKGYIEN
CSTPNTYICMQRTVSDPTRVETATETAWISLVTALHLVLGLSAVLGLLLLRWQFPAHYRRL
RHALWPSLPDLHRVLGQYLRDTAALSPPKATVSDTCEEVEPSLLEILPKSSERTPLPLKSR
QTPPLASVEMEAMEALPVTWGTSSRDEDLENCSHHLLELGPWSPEVPSTLEVYSCHPPR
SPAKRLQLTELQEPAELVESDGVPKPSFWPTAQNSGGSAYSEERDRPYGLVSIDTVTVLDA
EGPCTWPCSCEDDGYPALDLDAGLEPSECDFTSPGDEGPPRSYLRQWVVIPPPLSSPGPQ
AS
SEQ ID NO: 86 (BM NKG2D-IL15Rα-IL-23R-2 amino acid sequence)
MALPVTALLLPLALLLHAARPDVVMTQSPLSLPVTPGEPASISCRSSQSLVHSNANTYLH
WYLQKPGQSPQLLIYKVSNRFSGVPDRFSGSGSGTDFTLKISRVEAEDVGVYYCSQNTH
VPPTFGQGTKLEIKRGGGGSGGGGSGGGGSQVQLVQSGAEVKKPGASVKVSCKASGYT
FTDYEMHWVRQAPGQGLEWMGALDPKTGDTAYSQKFKGRVTLTADESTSTAYMELSSL
RSEDTAVYYCTRFYSYTYWGQGTLVTVSSTTTPAPRPPTPAPTIASQPLSLRPEACRPAAG
GAVHTRGLDFACDIYIWAPLAGTCGVLLLSLVITLYCKRGRKKLLYIFKQPFMRPVQTTQE
EDGCSCRFPEEEEGGCELRVKFSRSADAPAYKQGQNQLYNELNLGRREEYDVLDKRRGR
DPEMGGKPRRKNPQEGLYNELQKDKMAEAYSEIGMKGERRRGKGHDGLYQGLSTATKD
TYDALHMQALPPRGSGATNFSLLKQAGDVEENPGPMALPVTALLLPLALLLHAARPSLF
NQEVQIPLTESYCGPCPKNWICYKNNCYQFFDESKNWYESQASCMSQNASLLKVYSKED
QDLLKLVKSYHWMGLVHIPTNGSWQWEDGSILSPNLLTIIEMQKGDCALYASSFKGYIEN
CSTPNTYICMQRTVSDPTRVETATETAWISLVTALHLVLGLSAVLGLLLLRWQFPAHYRRL
RHALWPSLPDLHRVLGQYLRDTAALSPPKATVSDTCEEVEPSLLEILPKSSERTPLPLKSR
QTPPLASVEMEAMEALPVTWGTSSRDEDLENCSHHLEFVSCLGIVNEELPSINTYFPQNIL
ESHENRIS
SEQ ID NO: 87 (BM NKG2D-IL15Rα-GM-CSFRα amino acid sequence)
MALPVTALLLPLALLLHAARPDVVMTQSPLSLPVTPGEPASISCRSSQSLVHSNANTYLH
WYLQKPGQSPQLLIYKVSNRFSGVPDRFSGSGSGTDFTLKISRVEAEDVGVYYCSQNTH
VPPTFGQGTKLEIKRGGGGSGGGGSGGGGSQVQLVQSGAEVKKPGASVKVSCKASGYT
FTDYEMHWVRQAPGQGLEWMGALDPKTGDTAYSQKFKGRVTLTADESTSTAYMELSSL
RSEDTAVYYCTRFYSYTYWGQGTLVTVSSTTTPAPRPPTPAPTIASQPLSLRPEACRPAAG
GAVHTRGLDFACDIYIWAPLAGTCGVLLLSLVITLYCKRGRKKLLYIFKQPFMRPVQTTQE
EDGCSCRFPEEEEGGCELRVKFSRSADAPAYKQGQNQLYNELNLGRREEYDVLDKRRGR
DPEMGGKPRRKNPQEGLYNELQKDKMAEAYSEIGMKGERRRGKGHDGLYQGLSTATKD
TYDALHMQALPPRGSGATNFSLLKQAGDVEENPGPMALPVTALLLPLALLLHAARPSLF
NQEVQIPLTESYCGPCPKNWICYKNNCYQFFDESKNWYESQASCMSQNASLLKVYSKED
QDLLKLVKSYHWMGLVHIPTNGSWQWEDGSILSPNLLTIIEMQKGDCALYASSFKGYIEN
CSTPNTYICMQRTVSDPTRVETATETAWISLVTALHLVLGLSAVLGLLLLRWQFPAHYRRL
RHALWPSLPDLHRVLGQYLRDTAALSPPKATVSDTCEEVEPSLLEILPKSSERTPLPLKSR
QTPPLASVEMEAMEALPVTWGTSSRDEDLENCSHHLEVEDEIIWEEFTPEEGKGYREEV
LTVKEIT
SEQ ID NO: 88 (BM NKG2D-IL15Rα-GM-CSFRβ-1 amino acid sequence)
MALPVTALLLPLALLLHAARPDVVMTQSPLSLPVTPGEPASISCRSSQSLVHSNANTYLH
WYLQKPGQSPQLLIYKVSNRFSGVPDRFSGSGSGTDFTLKISRVEAEDVGVYYCSQNTH
VPPTFGQGTKLEIKRGGGGSGGGGSGGGGSQVQLVQSGAEVKKPGASVKVSCKASGYT
FTDYEMHWVRQAPGQGLEWMGALDPKTGDTAYSQKFKGRVTLTADESTSTAYMELSSL
RSEDTAVYYCTRFYSYTYWGQGTLVTVSSTTTPAPRPPTPAPTIASQPLSLRPEACRPAAG
GAVHTRGLDFACDIYIWAPLAGTCGVLLLSLVITLYCKRGRKKLLYIFKQPFMRPVQTTQE
EDGCSCRFPEEEEGGCELRVKFSRSADAPAYKQGQNQLYNELNLGRREEYDVLDKRRGR
DPEMGGKPRRKNPQEGLYNELQKDKMAEAYSEIGMKGERRRGKGHDGLYQGLSTATKD
TYDALHMQALPPRGSGATNFSLLKQAGDVEENPGPMALPVTALLLPLALLLHAARPSLF
NQEVQIPLTESYCGPCPKNWICYKNNCYQFFDESKNWYESQASCMSQNASLLKVYSKED
QDLLKLVKSYHWMGLVHIPTNGSWQWEDGSILSPNLLTIIEMQKGDCALYASSFKGYIEN
CSTPNTYICMQRTVSDPTRVETATETAWISLVTALHLVLGLSAVLGLLLLRWQFPAHYRRL
RHALWPSLPDLHRVLGQYLRDTAALSPPKATVSDTCEEVEPSLLEILPKSSERTPLPLKSR
QTPPLASVEMEAMEALPVTWGTSSRDEDLENCSHHLDTEDPGVASGYVSSADLVFTPNS
GASSVSGPPGAPGPVKSGFEGYVELPPIEGRSPRSQPEGLLVLQQVGDYCFLPGLGPGPLS
LRSKQVPVIQLFKALKQQDYLSLPPWEVNKPGEVC
SEQ ID NO: 89 (BM NKG2D-IL15Rα-GM-CSFRβ-2 amino acid sequence)
MALPVTALLLPLALLLHAARPDVVMTQSPLSLPVTPGEPASISCRSSQSLVHSNANTYLH
WYLQKPGQSPQLLIYKVSNRFSGVPDRFSGSGSGTDFTLKISRVEAEDVGVYYCSQNTH
VPPTFGQGTKLEIKRGGGGSGGGGSGGGGSQVQLVQSGAEVKKPGASVKVSCKASGYT
FTDYEMHWVRQAPGQGLEWMGALDPKTGDTAYSQKFKGRVTLTADESTSTAYMELSSL
RSEDTAVYYCTRFYSYTYWGQGTLVTVSSTTTPAPRPPTPAPTIASQPLSLRPEACRPAAG
GAVHTRGLDFACDIYIWAPLAGTCGVLLLSLVITLYCKRGRKKLLYIFKQPFMRPVQTTQE
EDGCSCRFPEEEEGGCELRVKFSRSADAPAYKQGQNQLYNELNLGRREEYDVLDKRRGR
DPEMGGKPRRKNPQEGLYNELQKDKMAEAYSEIGMKGERRRGKGHDGLYQGLSTATKD
TYDALHMQALPPRGSGATNFSLLKQAGDVEENPGPMALPVTALLLPLALLLHAARPSLF
NQEVQIPLTESYCGPCPKNWICYKNNCYQFFDESKNWYESQASCMSQNASLLKVYSKED
QDLLKLVKSYHWMGLVHIPTNGSWQWEDGSILSPNLLTIIEMQKGDCALYASSFKGYIEN
CSTPNTYICMQRTVSDPTRVETATETAWISLVTALHLVLGLSAVLGLLLLRWQFPAHYRRL
RHALWPSLPDLHRVLGQYLRDTAALSPPKATVSDTCEEVEPSLLEILPKSSERTPLPLKSR
QTPPLASVEMEAMEALPVTWGTSSRDEDLENCSHHLEKQASSFDFNGPYLGPPHSRSLP
DILGQPEPPQEGGSQKSPPPGSLEYLCLPAGGQVQLVPLAQDTEDPGVASGYVSSADLVFT
PNSGASSVSGPPGAPGPVKSGFEGYVELPPIEGRSPRSQPEGLLVLQQVGDYCFLPGLGPG
PLSLRSKQVPVIQLFKALKQQDYLSLPPWEVNKPGEVC
SEQ ID NO: 90 (BM NKG2D-IL15Rβ-1-IL-21R-1 amino acid sequence)
MALPVTALLLPLALLLHAARPDVVMTQSPLSLPVTPGEPASISCRSSQSLVHSNANTYLH
WYLQKPGQSPQLLIYKVSNRFSGVPDRFSGSGSGTDFTLKISRVEAEDVGVYYCSQNTH
VPPTFGQGTKLEIKRGGGGSGGGGSGGGGSQVQLVQSGAEVKKPGASVKVSCKASGYT
FTDYEMHWVRQAPGQGLEWMGALDPKTGDTAYSQKFKGRVTLTADESTSTAYMELSSL
RSEDTAVYYCTRFYSYTYWGQGTLVTVSSTTTPAPRPPTPAPTIASQPLSLRPEACRPAAG
GAVHTRGLDFACDIYIWAPLAGTCGVLLLSLVITLYCKRGRKKLLYIFKQPFMRPVQTTQE
EDGCSCRFPEEEEGGCELRVKFSRSADAPAYKQGQNQLYNELNLGRREEYDVLDKRRGR
DPEMGGKPRRKNPQEGLYNELQKDKMAEAYSEIGMKGERRRGKGHDGLYQGLSTATKD
TYDALHMQALPPRGSGATNFSLLKQAGDVEENPGPMALPVTALLLPLALLLHAARPSLF
NQEVQIPLTESYCGPCPKNWICYKNNCYQFFDESKNWYESQASCMSQNASLLKVYSKED
QDLLKLVKSYHWMGLVHIPTNGSWQWEDGSILSPNLLTIIEMQKGDCALYASSFKGYIEN
CSTPNTYICMQRTVSDPTRVETATETAWISLVTALHLVLGLSAVLGLLLLRWQFPAHYRRL
RHALWPSLPDLHRVLGQYLRDTAALSPPKATVSDTCEEVEPSLLEILPKSSERTPLPLVTQL
LLQQDKVPEPASLSSNHSLTSCFTNQGYFFFHLPDALEIEACQVYFTYDPYSEEDPDEGVA
GAPTGSSPQPLQPLSGEDDAYCTFPSRDDLLLFSPSLLGGPSPPSTAPGGSGAGEERMPPSL
QERVPRDWDPQPLGPPTPGVPDLVDFQPPPELVLREAGEEVPDAGPREGVSFPWSRPPGQ
GEFRALNARLPLNTDAYLSLQELQGQDPTHLVLELGPWSPEVPSTLEVYSCHPPRSPAKR
LQLTELQEPAELVESDGVPKPSFWPTAQNSGGSAYSEERDRPYGLVSIDTVTVLDAEGPCT
WPCSCEDDGYPALDLDAGLEPS
SEQ ID NO: 91 (BM NKG2D-IL15Rβ-1-IL-21R-2 amino acid sequence)
MALPVTALLLPLALLLHAARPDVVMTQSPLSLPVTPGEPASISCRSSQSLVHSNANTYLH
WYLQKPGQSPQLLIYKVSNRFSGVPDRFSGSGSGTDFTLKISRVEAEDVGVYYCSQNTH
VPPTFGQGTKLEIKRGGGGSGGGGSGGGGSQVQLVQSGAEVKKPGASVKVSCKASGYT
FTDYEMHWVRQAPGQGLEWMGALDPKTGDTAYSQKFKGRVTLTADESTSTAYMELSSL
RSEDTAVYYCTRFYSYTYWGQGTLVTVSSTTTPAPRPPTPAPTIASQPLSLRPEACRPAAG
GAVHTRGLDFACDIYIWAPLAGTCGVLLLSLVITLYCKRGRKKLLYIFKQPFMRPVQTTQE
EDGCSCRFPEEEEGGCELRVKFSRSADAPAYKQGQNQLYNELNLGRREEYDVLDKRRGR
DPEMGGKPRRKNPQEGLYNELQKDKMAEAYSEIGMKGERRRGKGHDGLYQGLSTATKD
TYDALHMQALPPRGSGATNFSLLKQAGDVEENPGPMALPVTALLLPLALLLHAARPSLF
NQEVQIPLTESYCGPCPKNWICYKNNCYQFFDESKNWYESQASCMSQNASLLKVYSKED
QDLLKLVKSYHWMGLVHIPTNGSWQWEDGSILSPNLLTIIEMQKGDCALYASSFKGYIEN
CSTPNTYICMQRTVSDPTRVETATETAWISLVTALHLVLGLSAVLGLLLLRWQFPAHYRRL
RHALWPSLPDLHRVLGQYLRDTAALSPPKATVSDTCEEVEPSLLEILPKSSERTPLPLVTQL
LLQQDKVPEPASLSSNHSLTSCFTNQGYFFFHLPDALEIEACQVYFTYDPYSEEDPDEGVA
GAPTGSSPQPLQPLSGEDDAYCTFPSRDDLLLFSPSLLGGPSPPSTAPGGSGAGEERMPPSL
QERVPRDWDPQPLGPPTPGVPDLVDFQPPPELVLREAGEEVPDAGPREGVSFPWSRPPGQ
GEFRALNARLPLNTDAYLSLQELQGQDPTHLVECDFTSPGDEGPPRSYLRQWVVIPPPLS
SPGPQAS
SEQ ID NO: 92 (BM NKG2D-IL15Rβ-1-IL-21R-3 amino acid sequence)
MALPVTALLLPLALLLHAARPDVVMTQSPLSLPVTPGEPASISCRSSQSLVHSNANTYLH
WYLQKPGQSPQLLIYKVSNRFSGVPDRFSGSGSGTDFTLKISRVEAEDVGVYYCSQNTH
VPPTFGQGTKLEIKRGGGGSGGGGSGGGGSQVQLVQSGAEVKKPGASVKVSCKASGYT
FTDYEMHWVRQAPGQGLEWMGALDPKTGDTAYSQKFKGRVTLTADESTSTAYMELSSL
RSEDTAVYYCTRFYSYTYWGQGTLVTVSSTTTPAPRPPTPAPTIASQPLSLRPEACRPAAG
GAVHTRGLDFACDIYIWAPLAGTCGVLLLSLVITLYCKRGRKKLLYIFKQPFMRPVQTTQE
EDGCSCRFPEEEEGGCELRVKFSRSADAPAYKQGQNQLYNELNLGRREEYDVLDKRRGR
DPEMGGKPRRKNPQEGLYNELQKDKMAEAYSEIGMKGERRRGKGHDGLYQGLSTATKD
TYDALHMQALPPRGSGATNFSLLKQAGDVEENPGPMALPVTALLLPLALLLHAARPSLF
NQEVQIPLTESYCGPCPKNWICYKNNCYQFFDESKNWYESQASCMSQNASLLKVYSKED
QDLLKLVKSYHWMGLVHIPTNGSWQWEDGSILSPNLLTIIEMQKGDCALYASSFKGYIEN
CSTPNTYICMQRTVSDPTRVETATETAWISLVTALHLVLGLSAVLGLLLLRWQFPAHYRRL
RHALWPSLPDLHRVLGQYLRDTAALSPPKATVSDTCEEVEPSLLEILPKSSERTPLPLVTQL
LLQQDKVPEPASLSSNHSLTSCFTNQGYFFFHLPDALEIEACQVYFTYDPYSEEDPDEGVA
GAPTGSSPQPLQPLSGEDDAYCTFPSRDDLLLFSPSLLGGPSPPSTAPGGSGAGEERMPPSL
QERVPRDWDPQPLGPPTPGVPDLVDFQPPPELVLREAGEEVPDAGPREGVSFPWSRPPGQ
GEFRALNARLPLNTDAYLSLQELQGQDPTHLVLELGPWSPEVPSTLEVYSCHPPRSPAKR
LQLTELQEPAELVESDGVPKPSFWPTAQNSGGSAYSEERDRPYGLVSIDTVTVLDAEGPCT
WPCSCEDDGYPALDLDAGLEPSECDFTSPGDEGPPRSYLRQWVVIPPPLSSPGPQAS
SEQ ID NO: 93 (BM NKG2D-IL15Rβ-1-IL-23R-2 amino acid sequence)
MALPVTALLLPLALLLHAARPDVVMTQSPLSLPVTPGEPASISCRSSQSLVHSNANTYLH
WYLQKPGQSPQLLIYKVSNRFSGVPDRFSGSGSGTDFTLKISRVEAEDVGVYYCSQNTH
VPPTFGQGTKLEIKRGGGGSGGGGSGGGGSQVQLVQSGAEVKKPGASVKVSCKASGYT
FTDYEMHWVRQAPGQGLEWMGALDPKTGDTAYSQKFKGRVTLTADESTSTAYMELSSL
RSEDTAVYYCTRFYSYTYWGQGTLVTVSSTTTPAPRPPTPAPTIASQPLSLRPEACRPAAG
GAVHTRGLDFACDIYIWAPLAGTCGVLLLSLVITLYCKRGRKKLLYIFKQPFMRPVQTTQE
EDGCSCRFPEEEEGGCELRVKFSRSADAPAYKQGQNQLYNELNLGRREEYDVLDKRRGR
DPEMGGKPRRKNPQEGLYNELQKDKMAEAYSEIGMKGERRRGKGHDGLYQGLSTATKD
TYDALHMQALPPRGSGATNFSLLKQAGDVEENPGPMALPVTALLLPLALLLHAARPSLF
NQEVQIPLTESYCGPCPKNWICYKNNCYQFFDESKNWYESQASCMSQNASLLKVYSKED
QDLLKLVKSYHWMGLVHIPTNGSWQWEDGSILSPNLLTIIEMQKGDCALYASSFKGYIEN
CSTPNTYICMQRTVSDPTRVETATETAWISLVTALHLVLGLSAVLGLLLLRWQFPAHYRRL
RHALWPSLPDLHRVLGQYLRDTAALSPPKATVSDTCEEVEPSLLEILPKSSERTPLPLVTQL
LLQQDKVPEPASLSSNHSLTSCFTNQGYFFFHLPDALEIEACQVYFTYDPYSEEDPDEGVA
GAPTGSSPQPLQPLSGEDDAYCTFPSRDDLLLFSPSLLGGPSPPSTAPGGSGAGEERMPPSL
QERVPRDWDPQPLGPPTPGVPDLVDFQPPPELVLREAGEEVPDAGPREGVSFPWSRPPGQ
GEFRALNARLPLNTDAYLSLQELQGQDPTHLVEFVSCLGIVNEELPSINTYFPQNILESHF
NRIS
SEQ ID NO: 94 (BM NKG2D-IL15Rβ-1-GM-CSFRα amino acid sequence)
MALPVTALLLPLALLLHAARPDVVMTQSPLSLPVTPGEPASISCRSSQSLVHSNANTYLH
WYLQKPGQSPQLLIYKVSNRFSGVPDRFSGSGSGTDFTLKISRVEAEDVGVYYCSQNTH
VPPTFGQGTKLEIKRGGGGSGGGGSGGGGSQVQLVQSGAEVKKPGASVKVSCKASGYT
FTDYEMHWVRQAPGQGLEWMGALDPKTGDTAYSQKFKGRVTLTADESTSTAYMELSSL
RSEDTAVYYCTRFYSYTYWGQGTLVTVSSTTTPAPRPPTPAPTIASQPLSLRPEACRPAAG
GAVHTRGLDFACDIYIWAPLAGTCGVLLLSLVITLYCKRGRKKLLYIFKQPFMRPVQTTQE
EDGCSCRFPEEEEGGCELRVKFSRSADAPAYKQGQNQLYNELNLGRREEYDVLDKRRGR
DPEMGGKPRRKNPQEGLYNELQKDKMAEAYSEIGMKGERRRGKGHDGLYQGLSTATKD
TYDALHMQALPPRGSGATNFSLLKQAGDVEENPGPMALPVTALLLPLALLLHAARPSLF
NQEVQIPLTESYCGPCPKNWICYKNNCYQFFDESKNWYESQASCMSQNASLLKVYSKED
QDLLKLVKSYHWMGLVHIPTNGSWQWEDGSILSPNLLTIIEMQKGDCALYASSFKGYIEN
CSTPNTYICMQRTVSDPTRVETATETAWISLVTALHLVLGLSAVLGLLLLRWQFPAHYRRL
RHALWPSLPDLHRVLGQYLRDTAALSPPKATVSDTCEEVEPSLLEILPKSSERTPLPLVTQL
LLQQDKVPEPASLSSNHSLTSCFTNQGYFFFHLPDALEIEACQVYFTYDPYSEEDPDEGVA
GAPTGSSPQPLQPLSGEDDAYCTFPSRDDLLLFSPSLLGGPSPPSTAPGGSGAGEERMPPSL
QERVPRDWDPQPLGPPTPGVPDLVDFQPPPELVLREAGEEVPDAGPREGVSFPWSRPPGQ
GEFRALNARLPLNTDAYLSLQELQGQDPTHLVEVEDEIIWEEFTPEEGKGYREEVLTVKEI
T
SEQ ID NO: 95 (BM NKG2D-IL15Rβ-1-GM-CSFRβ-1 amino acid sequence)
MALPVTALLLPLALLLHAARPDVVMTQSPLSLPVTPGEPASISCRSSQSLVHSNANTYLH
WYLQKPGQSPQLLIYKVSNRFSGVPDRFSGSGSGTDFTLKISRVEAEDVGVYYCSQNTH
VPPTFGQGTKLEIKRGGGGSGGGGSGGGGSQVQLVQSGAEVKKPGASVKVSCKASGYT
FTDYEMHWVRQAPGQGLEWMGALDPKTGDTAYSQKFKGRVTLTADESTSTAYMELSSL
RSEDTAVYYCTRFYSYTYWGQGTLVTVSSTTTPAPRPPTPAPTIASQPLSLRPEACRPAAG
GAVHTRGLDFACDIYIWAPLAGTCGVLLLSLVITLYCKRGRKKLLYIFKQPFMRPVQTTQE
EDGCSCRFPEEEEGGCELRVKFSRSADAPAYKQGQNQLYNELNLGRREEYDVLDKRRGR
DPEMGGKPRRKNPQEGLYNELQKDKMAEAYSEIGMKGERRRGKGHDGLYQGLSTATKD
TYDALHMQALPPRGSGATNFSLLKQAGDVEENPGPMALPVTALLLPLALLLHAARPSLF
NQEVQIPLTESYCGPCPKNWICYKNNCYQFFDESKNWYESQASCMSQNASLLKVYSKED
QDLLKLVKSYHWMGLVHIPTNGSWQWEDGSILSPNLLTIIEMQKGDCALYASSFKGYIEN
CSTPNTYICMQRTVSDPTRVETATETAWISLVTALHLVLGLSAVLGLLLLRWQFPAHYRRL
RHALWPSLPDLHRVLGQYLRDTAALSPPKATVSDTCEEVEPSLLEILPKSSERTPLPLVTQL
LLQQDKVPEPASLSSNHSLTSCFTNQGYFFFHLPDALEIEACQVYFTYDPYSEEDPDEGVA
GAPTGSSPQPLQPLSGEDDAYCTFPSRDDLLLFSPSLLGGPSPPSTAPGGSGAGEERMPPSL
QERVPRDWDPQPLGPPTPGVPDLVDFQPPPELVLREAGEEVPDAGPREGVSFPWSRPPGQ
GEFRALNARLPLNTDAYLSLQELQGQDPTHLVDTEDPGVASGYVSSADLVFTPNSGASSV
SGPPGAPGPVKSGFEGYVELPPIEGRSPRSQPEGLLVLQQVGDYCFLPGLGPGPLSLRSKQ
VPVIQLFKALKQQDYLSLPPWEVNKPGEVC
SEQ ID NO: 96 (BM NKG2D-IL15Rβ-1-GM-CSFRβ-2 amino acid sequence)
MALPVTALLLPLALLLHAARPDVVMTQSPLSLPVTPGEPASISCRSSQSLVHSNANTYLH
WYLQKPGQSPQLLIYKVSNRFSGVPDRFSGSGSGTDFTLKISRVEAEDVGVYYCSQNTH
VPPTFGQGTKLEIKRGGGGSGGGGSGGGGSQVQLVQSGAEVKKPGASVKVSCKASGYT
FTDYEMHWVRQAPGQGLEWMGALDPKTGDTAYSQKFKGRVTLTADESTSTAYMELSSL
RSEDTAVYYCTRFYSYTYWGQGTLVTVSSTTTPAPRPPTPAPTIASQPLSLRPEACRPAAG
GAVHTRGLDFACDIYIWAPLAGTCGVLLLSLVITLYCKRGRKKLLYIFKQPFMRPVQTTQE
EDGCSCRFPEEEEGGCELRVKFSRSADAPAYKQGQNQLYNELNLGRREEYDVLDKRRGR
DPEMGGKPRRKNPQEGLYNELQKDKMAEAYSEIGMKGERRRGKGHDGLYQGLSTATKD
TYDALHMQALPPRGSGATNFSLLKQAGDVEENPGPMALPVTALLLPLALLLHAARPSLF
NQEVQIPLTESYCGPCPKNWICYKNNCYQFFDESKNWYESQASCMSQNASLLKVYSKED
QDLLKLVKSYHWMGLVHIPTNGSWQWEDGSILSPNLLTIIEMQKGDCALYASSFKGYIEN
CSTPNTYICMQRTVSDPTRVETATETAWISLVTALHLVLGLSAVLGLLLLRWQFPAHYRRL
RHALWPSLPDLHRVLGQYLRDTAALSPPKATVSDTCEEVEPSLLEILPKSSERTPLPLVTQL
LLQQDKVPEPASLSSNHSLTSCFTNQGYFFFHLPDALEIEACQVYFTYDPYSEEDPDEGVA
GAPTGSSPQPLQPLSGEDDAYCTFPSRDDLLLFSPSLLGGPSPPSTAPGGSGAGEERMPPSL
QERVPRDWDPQPLGPPTPGVPDLVDFQPPPELVLREAGEEVPDAGPREGVSFPWSRPPGQ
GEFRALNARLPLNTDAYLSLQELQGQDPTHLVEKQASSFDFNGPYLGPPHSRSLPDILGQ
PEPPQEGGSQKSPPPGSLEYLCLPAGGQVQLVPLAQDTEDPGVASGYVSSADLVFTPNSG
ASSVSGPPGAPGPVKSGFEGYVELPPIEGRSPRSQPEGLLVLQQVGDYCFLPGLGPGPLSL
RSKQVPVIQLFKALKQQDYLSLPPWEVNKPGEVC
SEQ ID NO: 97 (BM NKG2D-IL15Rβ-2-IL-21R-1 amino acid sequence)
MALPVTALLLPLALLLHAARPDVVMTQSPLSLPVTPGEPASISCRSSQSLVHSNANTYLH
WYLQKPGQSPQLLIYKVSNRFSGVPDRFSGSGSGTDFTLKISRVEAEDVGVYYCSQNTH
VPPTFGQGTKLEIKRGGGGSGGGGSGGGGSQVQLVQSGAEVKKPGASVKVSCKASGYT
FTDYEMHWVRQAPGQGLEWMGALDPKTGDTAYSQKFKGRVTLTADESTSTAYMELSSL
RSEDTAVYYCTRFYSYTYWGQGTLVTVSSTTTPAPRPPTPAPTIASQPLSLRPEACRPAAG
GAVHTRGLDFACDIYIWAPLAGTCGVLLLSLVITLYCKRGRKKLLYIFKQPFMRPVQTTQE
EDGCSCRFPEEEEGGCELRVKFSRSADAPAYKQGQNQLYNELNLGRREEYDVLDKRRGR
DPEMGGKPRRKNPQEGLYNELQKDKMAEAYSEIGMKGERRRGKGHDGLYQGLSTATKD
TYDALHMQALPPRGSGATNFSLLKQAGDVEENPGPMALPVTALLLPLALLLHAARPSLF
NQEVQIPLTESYCGPCPKNWICYKNNCYQFFDESKNWYESQASCMSQNASLLKVYSKED
QDLLKLVKSYHWMGLVHIPTNGSWQWEDGSILSPNLLTIIEMQKGDCALYASSFKGYIEN
CSTPNTYICMQRTVSDPTRVETATETAWISLVTALHLVLGLSAVLGLLLLRWQFPAHYRRL
RHALWPSLPDLHRVLGQYLRDTAALSPPKATVSDTCEEVEPSLLEILPKSSERTPLPLEPAS
LSSNHSLTSCFTNQGYFFFHLPDALEIEACQVYFTYDPYSEEDPDEGVAGAPTGSSPQPLQ
PLSGEDDAYCTFPSRDDLLLFSEFRALNARLPLNTDAYLSLQELQGQDPTHLVLELGPWS
PEVPSTLEVYSCHPPRSPAKRLQLTELQEPAELVESDGVPKPSFWPTAQNSGGSAYSEERD
RPYGLVSIDTVTVLDAEGPCTWPCSCEDDGYPALDLDAGLEPS
SEQ ID NO: 98 (BM NKG2D-IL15Rβ-2-IL-21R-2 amino acid sequence)
MALPVTALLLPLALLLHAARPDVVMTQSPLSLPVTPGEPASISCRSSQSLVHSNANTYLH
WYLQKPGQSPQLLIYKVSNRFSGVPDRFSGSGSGTDFTLKISRVEAEDVGVYYCSQNTH
VPPTFGQGTKLEIKRGGGGGGGGSGGGGSQVQLVQSGAEVKKPGASVKVSCKASGYT
FTDYEMHWVRQAPGQGLEWMGALDPKTGDTAYSQKFKGRVTLTADESTSTAYMELSSL
RSEDTAVYYCTRFYSYTYWGQGTLVTVSSTTTPAPRPPTPAPTIASQPLSLRPEACRPAAG
GAVHTRGLDFACDIYIWAPLAGTCGVLLLSLVITLYCKRGRKKLLYIFKQPFMRPVQTTQE
EDGCSCRFPEEEEGGCELRVKFSRSADAPAYKQGQNQLYNELNLGRREEYDVLDKRRGR
DPEMGGKPRRKNPQEGLYNELQKDKMAEAYSEIGMKGERRRGKGHDGLYQGLSTATKD
TYDALHMQALPPRGSGATNFSLLKQAGDVEENPGPMALPVTALLLPLALLLHAARPSLF
NQEVQIPLTESYCGPCPKNWICYKNNCYQFFDESKNWYESQASCMSQNASLLKVYSKED
QDLLKLVKSYHWMGLVHIPTNGSWQWEDGSILSPNLLTIIEMQKGDCALYASSFKGYIEN
CSTPNTYICMQRTVSDPTRVETATETAWISLVTALHLVLGLSAVLGLLLLRWQFPAHYRRL
RHALWPSLPDLHRVLGQYLRDTAALSPPKATVSDTCEEVEPSLLEILPKSSERTPLPLEPAS
LSSNHSLTSCFTNQGYFFFHLPDALEIEACQVYFTYDPYSEEDPDEGVAGAPTGSSPQPLQ
PLSGEDDAYCTFPSRDDLLLFSEFRALNARLPLNTDAYLSLQELQGQDPTHLVECDFTSPG
DEGPPRSYLRQWVVIPPPLSSPGPQAS
SEQ ID NO: 99 (BM NKG2D-IL15Rβ-2-IL-21R-3 amino acid sequence)
MALPVTALLLPLALLLHAARPDVVMTQSPLSLPVTPGEPASISCRSSQSLVHSNANTYLH
WYLQKPGQSPQLLIYKVSNRFSGVPDRFSGSGSGTDFTLKISRVEAEDVGVYYCSQNTH
VPPTFGQGTKLEIKRGGGGSGGGGSGGGGSQVQLVQSGAEVKKPGASVKVSCKASGYT
FTDYEMHWVRQAPGQGLEWMGALDPKTGDTAYSQKFKGRVTLTADESTSTAYMELSSL
RSEDTAVYYCTRFYSYTYWGQGTLVTVSSTTTPAPRPPTPAPTIASQPLSLRPEACRPAAG
GAVHTRGLDFACDIYIWAPLAGTCGVLLLSLVITLYCKRGRKKLLYIFKQPFMRPVQTTQE
EDGCSCRFPEEEEGGCELRVKFSRSADAPAYKQGQNQLYNELNLGRREEYDVLDKRRGR
DPEMGGKPRRKNPQEGLYNELQKDKMAEAYSEIGMKGERRRGKGHDGLYQGLSTATKD
TYDALHMQALPPRGSGATNFSLLKQAGDVEENPGPMALPVTALLLPLALLLHAARPSLF
NQEVQIPLTESYCGPCPKNWICYKNNCYQFFDESKNWYESQASCMSQNASLLKVYSKED
QDLLKLVKSYHWMGLVHIPTNGSWQWEDGSILSPNLLTIIEMQKGDCALYASSFKGYIEN
CSTPNTYICMQRTVSDPTRVETATETAWISLVTALHLVLGLSAVLGLLLLRWQFPAHYRRL
RHALWPSLPDLHRVLGQYLRDTAALSPPKATVSDTCEEVEPSLLEILPKSSERTPLPLEPAS
LSSNHSLTSCFTNQGYFFFHLPDALEIEACQVYFTYDPYSEEDPDEGVAGAPTGSSPQPLQ
PLSGEDDAYCTFPSRDDLLLFSEFRALNARLPLNTDAYLSLQELQGQDPTHLVLELGPWS
PEVPSTLEVYSCHPPRSPAKRLQLTELQEPAELVESDGVPKPSFWPTAQNSGGSAYSEERD
RPYGLVSIDTVTVLDAEGPCTWPCSCEDDGYPALDLDAGLEPSECDFTSPGDEGPPRSYL
RQWVVIPPPLSSPGPQAS
SEQ ID NO: 100 (BM NKG2D-IL15Rβ-2-IL-23R-2 amino acid sequence)
MALPVTALLLPLALLLHAARPDVVMTQSPLSLPVTPGEPASISCRSSQSLVHSNANTYLH
WYLQKPGQSPQLLIYKVSNRFSGVPDRFSGSGSGTDFTLKISRVEAEDVGVYYCSQNTH
VPPTFGQGTKLEIKRGGGGSGGGGSGGGGSQVQLVQSGAEVKKPGASVKVSCKASGYT
FTDYEMHWVRQAPGQGLEWMGALDPKTGDTAYSQKFKGRVTLTADESTSTAYMELSSL
RSEDTAVYYCTRFYSYTYWGQGTLVTVSSTTTPAPRPPTPAPTIASQPLSLRPEACRPAAG
GAVHTRGLDFACDIYIWAPLAGTCGVLLLSLVITLYCKRGRKKLLYIFKQPFMRPVQTTQE
EDGCSCRFPEEEEGGCELRVKFSRSADAPAYKQGQNQLYNELNLGRREEYDVLDKRRGR
DPEMGGKPRRKNPQEGLYNELQKDKMAEAYSEIGMKGERRRGKGHDGLYQGLSTATKD
TYDALHMQALPPRGSGATNFSLLKQAGDVEENPGPMALPVTALLLPLALLLHAARPSLF
NQEVQIPLTESYCGPCPKNWICYKNNCYQFFDESKNWYESQASCMSQNASLLKVYSKED
QDLLKLVKSYHWMGLVHIPTNGSWQWEDGSILSPNLLTIIEMQKGDCALYASSFKGYIEN
CSTPNTYICMQRTVSDPTRVETATETAWISLVTALHLVLGLSAVLGLLLLRWQFPAHYRRL
RHALWPSLPDLHRVLGQYLRDTAALSPPKATVSDTCEEVEPSLLEILPKSSERTPLPLEPAS
LSSNHSLTSCFTNQGYFFFHLPDALEIEACQVYFTYDPYSEEDPDEGVAGAPTGSSPQPLQ
PLSGEDDAYCTFPSRDDLLLFSEFRALNARLPLNTDAYLSLQELQGQDPTHLVEFVSCLGI
VNEELPSINTYFPQNILESHENRIS
SEQ ID NO: 101 (BM NKG2D-IL15Rβ-2-GM-CSFRα amino acid sequence)
MALPVTALLLPLALLLHAARPDVVMTQSPLSLPVTPGEPASISCRSSQSLVHSNANTYLH
WYLQKPGQSPQLLIYKVSNRFSGVPDRFSGSGSGTDFTLKISRVEAEDVGVYYCSQNTH
VPPTFGQGTKLEIKRGGGGSGGGGSGGGGSQVQLVQSGAEVKKPGASVKVSCKASGYT
FTDYEMHWVRQAPGQGLEWMGALDPKTGDTAYSQKFKGRVTLTADESTSTAYMELSSL
RSEDTAVYYCTRFYSYTYWGQGTLVTVSSTTTPAPRPPTPAPTIASQPLSLRPEACRPAAG
GAVHTRGLDFACDIYIWAPLAGTCGVLLLSLVITLYCKRGRKKLLYIFKQPFMRPVQTTQE
EDGCSCRFPEEEEGGCELRVKFSRSADAPAYKQGQNQLYNELNLGRREEYDVLDKRRGR
DPEMGGKPRRKNPQEGLYNELQKDKMAEAYSEIGMKGERRRGKGHDGLYQGLSTATKD
TYDALHMQALPPRGSGATNFSLLKQAGDVEENPGPMALPVTALLLPLALLLHAARPSLF
NQEVQIPLTESYCGPCPKNWICYKNNCYQFFDESKNWYESQASCMSQNASLLKVYSKED
QDLLKLVKSYHWMGLVHIPTNGSWQWEDGSILSPNLLTIIEMQKGDCALYASSFKGYIEN
CSTPNTYICMQRTVSDPTRVETATETAWISLVTALHLVLGLSAVLGLLLLRWQFPAHYRRL
RHALWPSLPDLHRVLGQYLRDTAALSPPKATVSDTCEEVEPSLLEILPKSSERTPLPLEPAS
LSSNHSLTSCFTNQGYFFFHLPDALEIEACQVYFTYDPYSEEDPDEGVAGAPTGSSPQPLQ
PLSGEDDAYCTFPSRDDLLLFSEFRALNARLPLNTDAYLSLQELQGQDPTHLVEVEDEIIW
EEFTPEEGKGYREEVLTVKEIT
SEQ ID NO: 102 (BM NKG2D-IL15Rβ-2-GM-CSFRβ-1 amino acid sequence)
MALPVTALLLPLALLLHAARPDVVMTQSPLSLPVTPGEPASISCRSSQSLVHSNANTYLH
WYLQKPGQSPQLLIYKVSNRFSGVPDRFSGSGSGTDFTLKISRVEAEDVGVYYCSQNTH
VPPTFGQGTKLEIKRGGGGSGGGGSGGGGSQVQLVQSGAEVKKPGASVKVSCKASGYT
FTDYEMHWVRQAPGQGLEWMGALDPKTGDTAYSQKFKGRVTLTADESTSTAYMELSSL
RSEDTAVYYCTRFYSYTYWGQGTLVTVSSTTTPAPRPPTPAPTIASQPLSLRPEACRPAAG
GAVHTRGLDFACDIYIWAPLAGTCGVLLLSLVITLYCKRGRKKLLYIFKQPFMRPVQTTQE
EDGCSCRFPEEEEGGCELRVKFSRSADAPAYKQGQNQLYNELNLGRREEYDVLDKRRGR
DPEMGGKPRRKNPQEGLYNELQKDKMAEAYSEIGMKGERRRGKGHDGLYQGLSTATKD
TYDALHMQALPPRGSGATNFSLLKQAGDVEENPGPMALPVTALLLPLALLLHAARPSLF
NQEVQIPLTESYCGPCPKNWICYKNNCYQFFDESKNWYESQASCMSQNASLLKVYSKED
QDLLKLVKSYHWMGLVHIPTNGSWQWEDGSILSPNLLTIIEMQKGDCALYASSFKGYIEN
CSTPNTYICMQRTVSDPTRVETATETAWISLVTALHLVLGLSAVLGLLLLRWQFPAHYRRL
RHALWPSLPDLHRVLGQYLRDTAALSPPKATVSDTCEEVEPSLLEILPKSSERTPLPLEPAS
LSSNHSLTSCFTNQGYFFFHLPDALEIEACQVYFTYDPYSEEDPDEGVAGAPTGSSPQPLQ
PLSGEDDAYCTFPSRDDLLLFSEFRALNARLPLNTDAYLSLQELQGQDPTHLVDTEDPGV
ASGYVSSADLVFTPNSGASSVSGPPGAPGPVKSGFEGYVELPPIEGRSPRSQPEGLLVLQQ
VGDYCFLPGLGPGPLSLRSKQVPVIQLFKALKQQDYLSLPPWEVNKPGEVC
SEQ ID NO: 103 (BM NKG2D-IL15Rβ-2-GM-CSFRβ-2 amino acid sequence)
MALPVTALLLPLALLLHAARPDVVMTQSPLSLPVTPGEPASISCRSSQSLVHSNANTYLH
WYLQKPGQSPQLLIYKVSNRFSGVPDRFSGSGSGTDFTLKISRVEAEDVGVYYCSQNTH
VPPTFGQGTKLEIKRGGGGSGGGGSGGGGSQVQLVQSGAEVKKPGASVKVSCKASGYT
FTDYEMHWVRQAPGQGLEWMGALDPKTGDTAYSQKFKGRVTLTADESTSTAYMELSSL
RSEDTAVYYCTRFYSYTYWGQGTLVTVSSTTTPAPRPPTPAPTIASQPLSLRPEACRPAAG
GAVHTRGLDFACDIYIWAPLAGTCGVLLLSLVITLYCKRGRKKLLYIFKQPFMRPVQTTQE
EDGCSCRFPEEEEGGCELRVKFSRSADAPAYKQGQNQLYNELNLGRREEYDVLDKRRGR
DPEMGGKPRRKNPQEGLYNELQKDKMAEAYSEIGMKGERRRGKGHDGLYQGLSTATKD
TYDALHMQALPPRGSGATNFSLLKQAGDVEENPGPMALPVTALLLPLALLLHAARPSLF
NQEVQIPLTESYCGPCPKNWICYKNNCYQFFDESKNWYESQASCMSQNASLLKVYSKED
QDLLKLVKSYHWMGLVHIPTNGSWQWEDGSILSPNLLTIIEMQKGDCALYASSFKGYIEN
CSTPNTYICMQRTVSDPTRVETATETAWISLVTALHLVLGLSAVLGLLLLRWQFPAHYRRL
RHALWPSLPDLHRVLGQYLRDTAALSPPKATVSDTCEEVEPSLLEILPKSSERTPLPLEPAS
LSSNHSLTSCFTNQGYFFFHLPDALEIEACQVYFTYDPYSEEDPDEGVAGAPTGSSPQPLQ
PLSGEDDAYCTFPSRDDLLLFSEFRALNARLPLNTDAYLSLQELQGQDPTHLVEKQASSF
DFNGPYLGPPHSRSLPDILGQPEPPQEGGSQKSPPPGSLEYLCLPAGGQVQLVPLAQDTED
PGVASGYVSSADLVFTPNSGASSVSGPPGAPGPVKSGFEGYVELPPIEGRSPRSQPEGLLV
LQQVGDYCFLPGLGPGPLSLRSKQVPVIQLFKALKQQDYLSLPPWEVNKPGEVC
SEQ ID NO: 104 (BM NKG2D-IL-21R-1-IL-23R-2 amino acid sequence)
MALPVTALLLPLALLLHAARPDVVMTQSPLSLPVTPGEPASISCRSSQSLVHSNANTYLH
WYLQKPGQSPQLLIYKVSNRFSGVPDRFSGSGSGTDFTLKISRVEAEDVGVYYCSQNTH
VPPTFGQGTKLEIKRGGGGSGGGGSGGGGSQVQLVQSGAEVKKPGASVKVSCKASGYT
FTDYEMHWVRQAPGQGLEWMGALDPKTGDTAYSQKFKGRVTLTADESTSTAYMELSSL
RSEDTAVYYCTRFYSYTYWGQGTLVTVSSTTTPAPRPPTPAPTIASQPLSLRPEACRPAAG
GAVHTRGLDFACDIYIWAPLAGTCGVLLLSLVITLYCKRGRKKLLYIFKQPFMRPVQTTQE
EDGCSCRFPEEEEGGCELRVKFSRSADAPAYKQGQNQLYNELNLGRREEYDVLDKRRGR
DPEMGGKPRRKNPQEGLYNELQKDKMAEAYSEIGMKGERRRGKGHDGLYQGLSTATKD
TYDALHMQALPPRGSGATNFSLLKQAGDVEENPGPMALPVTALLLPLALLLHAARPSLF
NQEVQIPLTESYCGPCPKNWICYKNNCYQFFDESKNWYESQASCMSQNASLLKVYSKED
QDLLKLVKSYHWMGLVHIPTNGSWQWEDGSILSPNLLTIIEMQKGDCALYASSFKGYIEN
CSTPNTYICMQRTVSDPTRVETATETAWISLVTALHLVLGLSAVLGLLLLRWQFPAHYRRL
RHALWPSLPDLHRVLGQYLRDTAALSPPKATVSDTCEEVEPSLLEILPKSSERTPLPLLELG
PWSPEVPSTLEVYSCHPPRSPAKRLQLTELQEPAELVESDGVPKPSFWPTAQNSGGSAYSE
ERDRPYGLVSIDTVTVLDAEGPCTWPCSCEDDGYPALDLDAGLEPSEFVSCLGIVNEELPS
INTYFPQNILESHENRIS
SEQ ID NO: 105 (BM NKG2D-IL-21R-1-GM-CSFRα amino acid sequence)
MALPVTALLLPLALLLHAARPDVVMTQSPLSLPVTPGEPASISCRSSQSLVHSNANTYLH
WYLQKPGQSPQLLIYKVSNRFSGVPDRFSGSGSGTDFTLKISRVEAEDVGVYYCSQNTH
VPPTFGQGTKLEIKRGGGGSGGGGSGGGGSQVQLVQSGAEVKKPGASVKVSCKASGYT
FTDYEMHWVRQAPGQGLEWMGALDPKTGDTAYSQKFKGRVTLTADESTSTAYMELSSL
RSEDTAVYYCTRFYSYTYWGQGTLVTVSSTTTPAPRPPTPAPTIASQPLSLRPEACRPAAG
GAVHTRGLDFACDIYIWAPLAGTCGVLLLSLVITLYCKRGRKKLLYIFKQPFMRPVQTTQE
EDGCSCRFPEEEEGGCELRVKFSRSADAPAYKQGQNQLYNELNLGRREEYDVLDKRRGR
DPEMGGKPRRKNPQEGLYNELQKDKMAEAYSEIGMKGERRRGKGHDGLYQGLSTATKD
TYDALHMQALPPRGSGATNFSLLKQAGDVEENPGPMALPVTALLLPLALLLHAARPSLF
NQEVQIPLTESYCGPCPKNWICYKNNCYQFFDESKNWYESQASCMSQNASLLKVYSKED
QDLLKLVKSYHWMGLVHIPTNGSWQWEDGSILSPNLLTIIEMQKGDCALYASSFKGYIEN
CSTPNTYICMQRTVSDPTRVETATETAWISLVTALHLVLGLSAVLGLLLLRWQFPAHYRRL
RHALWPSLPDLHRVLGQYLRDTAALSPPKATVSDTCEEVEPSLLEILPKSSERTPLPLLELG
PWSPEVPSTLEVYSCHPPRSPAKRLQLTELQEPAELVESDGVPKPSFWPTAQNSGGSAYSE
ERDRPYGLVSIDTVTVLDAEGPCTWPCSCEDDGYPALDLDAGLEPSEVEDEIIWEEFTPEE
GKGYREEVLTVKEIT
SEQ ID NO: 106 (BM NKG2D-IL-21R-1-GM-CSFRβ-1 amino acid sequence)
MALPVTALLLPLALLLHAARPDVVMTQSPLSLPVTPGEPASISCRSSQSLVHSNANTYLH
WYLQKPGQSPQLLIYKVSNRFSGVPDRFSGSGSGTDFTLKISRVEAEDVGVYYCSQNTH
VPPTFGQGTKLEIKRGGGGSGGGGSGGGGSQVQLVQSGAEVKKPGASVKVSCKASGYT
FTDYEMHWVRQAPGQGLEWMGALDPKTGDTAYSQKFKGRVTLTADESTSTAYMELSSL
RSEDTAVYYCTRFYSYTYWGQGTLVTVSSTTTPAPRPPTPAPTIASQPLSLRPEACRPAAG
GAVHTRGLDFACDIYIWAPLAGTCGVLLLSLVITLYCKRGRKKLLYIFKQPFMRPVQTTQE
EDGCSCRFPEEEEGGCELRVKFSRSADAPAYKQGQNQLYNELNLGRREEYDVLDKRRGR
DPEMGGKPRRKNPQEGLYNELQKDKMAEAYSEIGMKGERRRGKGHDGLYQGLSTATKD
TYDALHMQALPPRGSGATNFSLLKQAGDVEENPGPMALPVTALLLPLALLLHAARPSLF
NQEVQIPLTESYCGPCPKNWICYKNNCYQFFDESKNWYESQASCMSQNASLLKVYSKED
QDLLKLVKSYHWMGLVHIPTNGSWQWEDGSILSPNLLTIIEMQKGDCALYASSFKGYIEN
CSTPNTYICMQRTVSDPTRVETATETAWISLVTALHLVLGLSAVLGLLLLRWQFPAHYRRL
RHALWPSLPDLHRVLGQYLRDTAALSPPKATVSDTCEEVEPSLLEILPKSSERTPLPLLELG
PWSPEVPSTLEVYSCHPPRSPAKRLQLTELQEPAELVESDGVPKPSFWPTAQNSGGSAYSE
ERDRPYGLVSIDTVTVLDAEGPCTWPCSCEDDGYPALDLDAGLEPSDTEDPGVASGYVSS
ADLVFTPNSGASSVSGPPGAPGPVKSGFEGYVELPPIEGRSPRSQPEGLLVLQQVGDYCFL
PGLGPGPLSLRSKQVPVIQLFKALKQQDYLSLPPWEVNKPGEVC
SEQ ID NO: 107 (BM NKG2D-IL-21R-1-GM-CSFRβ-2 amino acid sequence)
MALPVTALLLPLALLLHAARPDVVMTQSPLSLPVTPGEPASISCRSSQSLVHSNANTYLH
WYLQKPGQSPQLLIYKVSNRFSGVPDRFSGSGSGTDFTLKISRVEAEDVGVYYCSQNTH
VPPTFGQGTKLEIKRGGGGSGGGGSGGGGSQVQLVQSGAEVKKPGASVKVSCKASGYT
FTDYEMHWVRQAPGQGLEWMGALDPKTGDTAYSQKFKGRVTLTADESTSTAYMELSSL
RSEDTAVYYCTRFYSYTYWGQGTLVTVSSTTTPAPRPPTPAPTIASQPLSLRPEACRPAAG
GAVHTRGLDFACDIYIWAPLAGTCGVLLLSLVITLYCKRGRKKLLYIFKQPFMRPVQTTQE
EDGCSCRFPEEEEGGCELRVKFSRSADAPAYKQGQNQLYNELNLGRREEYDVLDKRRGR
DPEMGGKPRRKNPQEGLYNELQKDKMAEAYSEIGMKGERRRGKGHDGLYQGLSTATKD
TYDALHMQALPPRGSGATNFSLLKQAGDVEENPGPMALPVTALLLPLALLLHAARPSLF
NQEVQIPLTESYCGPCPKNWICYKNNCYQFFDESKNWYESQASCMSQNASLLKVYSKED
QDLLKLVKSYHWMGLVHIPTNGSWQWEDGSILSPNLLTIIEMQKGDCALYASSFKGYIEN
CSTPNTYICMQRTVSDPTRVETATETAWISLVTALHLVLGLSAVLGLLLLRWQFPAHYRRL
RHALWPSLPDLHRVLGQYLRDTAALSPPKATVSDTCEEVEPSLLEILPKSSERTPLPLLELG
PWSPEVPSTLEVYSCHPPRSPAKRLQLTELQEPAELVESDGVPKPSFWPTAQNSGGSAYSE
ERDRPYGLVSIDTVTVLDAEGPCTWPCSCEDDGYPALDLDAGLEPSEKQASSFDFNGPYL
GPPHSRSLPDILGQPEPPQEGGSQKSPPPGSLEYLCLPAGGQVQLVPLAQDTEDPGVASGY
VSSADLVFTPNSGASSVSGPPGAPGPVKSGFEGYVELPPIEGRSPRSQPEGLLVLQQVGDY
CFLPGLGPGPLSLRSKQVPVIQLFKALKQQDYLSLPPWEVNKPGEVC
SEQ ID NO: 108 (BM NKG2D-IL-21R-2-IL-23R-2 amino acid sequence)
MALPVTALLLPLALLLHAARPDVVMTQSPLSLPVTPGEPASISCRSSQSLVHSNANTYLH
WYLQKPGQSPQLLIYKVSNRFSGVPDRFSGSGSGTDFTLKISRVEAEDVGVYYCSQNTH
VPPTFGQGTKLEIKRGGGGSGGGGSGGGGSQVQLVQSGAEVKKPGASVKVSCKASGYT
FTDYEMHWVRQAPGQGLEWMGALDPKTGDTAYSQKFKGRVTLTADESTSTAYMELSSL
RSEDTAVYYCTRFYSYTYWGQGTLVTVSSTTTPAPRPPTPAPTIASQPLSLRPEACRPAAG
GAVHTRGLDFACDIYIWAPLAGTCGVLLLSLVITLYCKRGRKKLLYIFKQPFMRPVQTTQE
EDGCSCRFPEEEEGGCELRVKFSRSADAPAYKQGQNQLYNELNLGRREEYDVLDKRRGR
DPEMGGKPRRKNPQEGLYNELQKDKMAEAYSEIGMKGERRRGKGHDGLYQGLSTATKD
TYDALHMQALPPRGSGATNFSLLKQAGDVEENPGPMALPVTALLLPLALLLHAARPSLF
NQEVQIPLTESYCGPCPKNWICYKNNCYQFFDESKNWYESQASCMSQNASLLKVYSKED
QDLLKLVKSYHWMGLVHIPTNGSWQWEDGSILSPNLLTIIEMQKGDCALYASSFKGYIEN
CSTPNTYICMQRTVSDPTRVETATETAWISLVTALHLVLGLSAVLGLLLLRWQFPAHYRRL
RHALWPSLPDLHRVLGQYLRDTAALSPPKATVSDTCEEVEPSLLEILPKSSERTPLPLECDF
TSPGDEGPPRSYLRQWVVIPPPLSSPGPQASEFVSCLGIVNEELPSINTYFPQNILESHFNRI
S
SEQ ID NO: 109 (BM NKG2D-IL-21R-2-GM-CSFRα amino acid sequence)
MALPVTALLLPLALLLHAARPDVVMTQSPLSLPVTPGEPASISCRSSQSLVHSNANTYLH
WYLQKPGQSPQLLIYKVSNRFSGVPDRFSGSGSGTDFTLKISRVEAEDVGVYYCSQNTH
VPPTFGQGTKLEIKRGGGGSGGGGSGGGGSQVQLVQSGAEVKKPGASVKVSCKASGYT
FTDYEMHWVRQAPGQGLEWMGALDPKTGDTAYSQKFKGRVTLTADESTSTAYMELSSL
RSEDTAVYYCTRFYSYTYWGQGTLVTVSSTTTPAPRPPTPAPTIASQPLSLRPEACRPAAG
GAVHTRGLDFACDIYIWAPLAGTCGVLLLSLVITLYCKRGRKKLLYIFKQPFMRPVQTTQE
EDGCSCRFPEEEEGGCELRVKFSRSADAPAYKQGQNQLYNELNLGRREEYDVLDKRRGR
DPEMGGKPRRKNPQEGLYNELQKDKMAEAYSEIGMKGERRRGKGHDGLYQGLSTATKD
TYDALHMQALPPRGSGATNFSLLKQAGDVEENPGPMALPVTALLLPLALLLHAARPSLF
NQEVQIPLTESYCGPCPKNWICYKNNCYQFFDESKNWYESQASCMSQNASLLKVYSKED
QDLLKLVKSYHWMGLVHIPTNGSWQWEDGSILSPNLLTIIEMQKGDCALYASSFKGYIEN
CSTPNTYICMQRTVSDPTRVETATETAWISLVTALHLVLGLSAVLGLLLLRWQFPAHYRRL
RHALWPSLPDLHRVLGQYLRDTAALSPPKATVSDTCEEVEPSLLEILPKSSERTPLPLECDF
TSPGDEGPPRSYLRQWVVIPPPLSSPGPQASEVEDEIIWEEFTPEEGKGYREEVLTVKEIT
SEQ ID NO: 110 (BM NKG2D-IL-21R-2-GM-CSFRβ-1 amino acid sequence)
MALPVTALLLPLALLLHAARPDVVMTQSPLSLPVTPGEPASISCRSSQSLVHSNANTYLH
WYLQKPGQSPQLLIYKVSNRFSGVPDRFSGSGSGTDFTLKISRVEAEDVGVYYCSQNTH
VPPTFGQGTKLEIKRGGGGSGGGGSGGGGSQVQLVQSGAEVKKPGASVKVSCKASGYT
FTDYEMHWVRQAPGQGLEWMGALDPKTGDTAYSQKFKGRVTLTADESTSTAYMELSSL
RSEDTAVYYCTRFYSYTYWGQGTLVTVSSTTTPAPRPPTPAPTIASQPLSLRPEACRPAAG
GAVHTRGLDFACDIYIWAPLAGTCGVLLLSLVITLYCKRGRKKLLYIFKQPFMRPVQTTQE
EDGCSCRFPEEEEGGCELRVKFSRSADAPAYKQGQNQLYNELNLGRREEYDVLDKRRGR
DPEMGGKPRRKNPQEGLYNELQKDKMAEAYSEIGMKGERRRGKGHDGLYQGLSTATKD
TYDALHMQALPPRGSGATNFSLLKQAGDVEENPGPMALPVTALLLPLALLLHAARPSLF
NQEVQIPLTESYCGPCPKNWICYKNNCYQFFDESKNWYESQASCMSQNASLLKVYSKED
QDLLKLVKSYHWMGLVHIPTNGSWQWEDGSILSPNLLTIIEMQKGDCALYASSFKGYIEN
CSTPNTYICMQRTVSDPTRVETATETAWISLVTALHLVLGLSAVLGLLLLRWQFPAHYRRL
RHALWPSLPDLHRVLGQYLRDTAALSPPKATVSDTCEEVEPSLLEILPKSSERTPLPLECDF
TSPGDEGPPRSYLRQWVVIPPPLSSPGPQASDTEDPGVASGYVSSADLVFTPNSGASSVSG
PPGAPGPVKSGFEGYVELPPIEGRSPRSQPEGLLVLQQVGDYCFLPGLGPGPLSLRSKQVP
VIQLFKALKQQDYLSLPPWEVNKPGEVC
SEQ ID NO: 111 (BM NKG2D-IL-21R-2-GM-CSFRβ-2 amino acid sequence)
MALPVTALLLPLALLLHAARPDVVMTQSPLSLPVTPGEPASISCRSSQSLVHSNANTYLH
WYLQKPGQSPQLLIYKVSNRFSGVPDRFSGSGSGTDFTLKISRVEAEDVGVYYCSQNTH
VPPTFGQGTKLEIKRGGGGSGGGGSGGGGSQVQLVQSGAEVKKPGASVKVSCKASGYT
FTDYEMHWVRQAPGQGLEWMGALDPKTGDTAYSQKFKGRVTLTADESTSTAYMELSSL
RSEDTAVYYCTRFYSYTYWGQGTLVTVSSTTTPAPRPPTPAPTIASQPLSLRPEACRPAAG
GAVHTRGLDFACDIYIWAPLAGTCGVLLLSLVITLYCKRGRKKLLYIFKQPFMRPVQTTQE
EDGCSCRFPEEEEGGCELRVKFSRSADAPAYKQGQNQLYNELNLGRREEYDVLDKRRGR
DPEMGGKPRRKNPQEGLYNELQKDKMAEAYSEIGMKGERRRGKGHDGLYQGLSTATKD
TYDALHMQALPPRGSGATNFSLLKQAGDVEENPGPMALPVTALLLPLALLLHAARPSLF
NQEVQIPLTESYCGPCPKNWICYKNNCYQFFDESKNWYESQASCMSQNASLLKVYSKED
QDLLKLVKSYHWMGLVHIPTNGSWQWEDGSILSPNLLTIIEMQKGDCALYASSFKGYIEN
CSTPNTYICMQRTVSDPTRVETATETAWISLVTALHLVLGLSAVLGLLLLRWQFPAHYRRL
RHALWPSLPDLHRVLGQYLRDTAALSPPKATVSDTCEEVEPSLLEILPKSSERTPLPLECDF
TSPGDEGPPRSYLRQWVVIPPPLSSPGPQASEKQASSFDFNGPYLGPPHSRSLPDILGQPEP
PQEGGSQKSPPPGSLEYLCLPAGGQVQLVPLAQDTEDPGVASGYVSSADLVFTPNSGASS
VSGPPGAPGPVKSGFEGYVELPPIEGRSPRSQPEGLLVLQQVGDYCFLPGLGPGPLSLRSK
QVPVIQLFKALKQQDYLSLPPWEVNKPGEVC
SEQ ID NO: 112 (BM NKG2D-IL-21R-3-IL-23R-2 amino acid sequence)
MALPVTALLLPLALLLHAARPDVVMTQSPLSLPVTPGEPASISCRSSQSLVHSNANTYLH
WYLQKPGQSPQLLIYKVSNRFSGVPDRFSGSGSGTDFTLKISRVEAEDVGVYYCSQNTH
VPPTFGQGTKLEIKRGGGGSGGGGSGGGGSQVQLVQSGAEVKKPGASVKVSCKASGYT
FTDYEMHWVRQAPGQGLEWMGALDPKTGDTAYSQKFKGRVTLTADESTSTAYMELSSL
RSEDTAVYYCTRFYSYTYWGQGTLVTVSSTTTPAPRPPTPAPTIASQPLSLRPEACRPAAG
GAVHTRGLDFACDIYIWAPLAGTCGVLLLSLVITLYCKRGRKKLLYIFKQPFMRPVQTTQE
EDGCSCRFPEEEEGGCELRVKFSRSADAPAYKQGQNQLYNELNLGRREEYDVLDKRRGR
DPEMGGKPRRKNPQEGLYNELQKDKMAEAYSEIGMKGERRRGKGHDGLYQGLSTATKD
TYDALHMQALPPRGSGATNFSLLKQAGDVEENPGPMALPVTALLLPLALLLHAARPSLF
NQEVQIPLTESYCGPCPKNWICYKNNCYQFFDESKNWYESQASCMSQNASLLKVYSKED
QDLLKLVKSYHWMGLVHIPTNGSWQWEDGSILSPNLLTIIEMQKGDCALYASSFKGYIEN
CSTPNTYICMQRTVSDPTRVETATETAWISLVTALHLVLGLSAVLGLLLLRWQFPAHYRRL
RHALWPSLPDLHRVLGQYLRDTAALSPPKATVSDTCEEVEPSLLEILPKSSERTPLPLLELG
PWSPEVPSTLEVYSCHPPRSPAKRLQLTELQEPAELVESDGVPKPSFWPTAQNSGGSAYSE
ERDRPYGLVSIDTVTVLDAEGPCTWPCSCEDDGYPALDLDAGLEPSECDFTSPGDEGPPR
SYLRQWVVIPPPLSSPGPQASEFVSCLGIVNEELPSINTYFPQNILESHENRIS
SEQ ID NO: 113 (BM NKG2D-IL-21R-3-GM-CSFRα amino acid sequence)
MALPVTALLLPLALLLHAARPDVVMTQSPLSLPVTPGEPASISCRSSQSLVHSNANTYLH
WYLQKPGQSPQLLIYKVSNRFSGVPDRFSGSGSGTDFTLKISRVEAEDVGVYYCSQNTH
VPPTFGQGTKLEIKRGGGGSGGGGSGGGGSQVQLVQSGAEVKKPGASVKVSCKASGYT
FTDYEMHWVRQAPGQGLEWMGALDPKTGDTAYSQKFKGRVTLTADESTSTAYMELSSL
RSEDTAVYYCTRFYSYTYWGQGTLVTVSSTTTPAPRPPTPAPTIASQPLSLRPEACRPAAG
GAVHTRGLDFACDIYIWAPLAGTCGVLLLSLVITLYCKRGRKKLLYIFKQPFMRPVQTTQE
EDGCSCRFPEEEEGGCELRVKFSRSADAPAYKQGQNQLYNELNLGRREEYDVLDKRRGR
DPEMGGKPRRKNPQEGLYNELQKDKMAEAYSEIGMKGERRRGKGHDGLYQGLSTATKD
TYDALHMQALPPRGSGATNFSLLKQAGDVEENPGPMALPVTALLLPLALLLHAARPSLF
NQEVQIPLTESYCGPCPKNWICYKNNCYQFFDESKNWYESQASCMSQNASLLKVYSKED
QDLLKLVKSYHWMGLVHIPTNGSWQWEDGSILSPNLLTIIEMQKGDCALYASSFKGYIEN
CSTPNTYICMQRTVSDPTRVETATETAWISLVTALHLVLGLSAVLGLLLLRWQFPAHYRRL
RHALWPSLPDLHRVLGQYLRDTAALSPPKATVSDTCEEVEPSLLEILPKSSERTPLPLLELG
PWSPEVPSTLEVYSCHPPRSPAKRLQLTELQEPAELVESDGVPKPSFWPTAQNSGGSAYSE
ERDRPYGLVSIDTVTVLDAEGPCTWPCSCEDDGYPALDLDAGLEPSECDFTSPGDEGPPR
SYLRQWVVIPPPLSSPGPQASEVEDEIIWEEFTPEEGKGYREEVLTVKEIT
SEQ ID NO: 114 (BM NKG2D-IL-21R-3-GM-CSFRβ-1 amino acid sequence)
MALPVTALLLPLALLLHAARPDVVMTQSPLSLPVTPGEPASISCRSSQSLVHSNANTYLH
WYLQKPGQSPQLLIYKVSNRFSGVPDRFSGSGSGTDFTLKISRVEAEDVGVYYCSQNTH
VPPTFGQGTKLEIKRGGGGSGGGGSGGGGSQVQLVQSGAEVKKPGASVKVSCKASGYT
FTDYEMHWVRQAPGQGLEWMGALDPKTGDTAYSQKFKGRVTLTADESTSTAYMELSSL
RSEDTAVYYCTRFYSYTYWGQGTLVTVSSTTTPAPRPPTPAPTIASQPLSLRPEACRPAAG
GAVHTRGLDFACDIYIWAPLAGTCGVLLLSLVITLYCKRGRKKLLYIFKQPFMRPVQTTQE
EDGCSCRFPEEEEGGCELRVKFSRSADAPAYKQGQNQLYNELNLGRREEYDVLDKRRGR
DPEMGGKPRRKNPQEGLYNELQKDKMAEAYSEIGMKGERRRGKGHDGLYQGLSTATKD
TYDALHMQALPPRGSGATNFSLLKQAGDVEENPGPMALPVTALLLPLALLLHAARPSLF
NQEVQIPLTESYCGPCPKNWICYKNNCYQFFDESKNWYESQASCMSQNASLLKVYSKED
QDLLKLVKSYHWMGLVHIPTNGSWQWEDGSILSPNLLTIIEMQKGDCALYASSFKGYIEN
CSTPNTYICMQRTVSDPTRVETATETAWISLVTALHLVLGLSAVLGLLLLRWQFPAHYRRL
RHALWPSLPDLHRVLGQYLRDTAALSPPKATVSDTCEEVEPSLLEILPKSSERTPLPLLELG
PWSPEVPSTLEVYSCHPPRSPAKRLQLTELQEPAELVESDGVPKPSFWPTAQNSGGSAYSE
ERDRPYGLVSIDTVTVLDAEGPCTWPCSCEDDGYPALDLDAGLEPSECDFTSPGDEGPPR
SYLRQWVVIPPPLSSPGPQASDTEDPGVASGYVSSADLVFTPNSGASSVSGPPGAPGPVKS
GFEGYVELPPIEGRSPRSQPEGLLVLQQVGDYCFLPGLGPGPLSLRSKQVPVIQLFKALKQ
QDYLSLPPWEVNKPGEVC
SEQ ID NO: 115 (BM NKG2D-IL-21R-3-GM-CSFRβ-2 amino acid sequence)
MALPVTALLLPLALLLHAARPDVVMTQSPLSLPVTPGEPASISCRSSQSLVHSNANTYLH
WYLQKPGQSPQLLIYKVSNRFSGVPDRFSGSGSGTDFTLKISRVEAEDVGVYYCSQNTH
VPPTFGQGTKLEIKRGGGGSGGGGSGGGGSQVQLVQSGAEVKKPGASVKVSCKASGYT
FTDYEMHWVRQAPGQGLEWMGALDPKTGDTAYSQKFKGRVTLTADESTSTAYMELSSL
RSEDTAVYYCTRFYSYTYWGQGTLVTVSSTTTPAPRPPTPAPTIASQPLSLRPEACRPAAG
GAVHTRGLDFACDIYIWAPLAGTCGVLLLSLVITLYCKRGRKKLLYIFKQPFMRPVQTTQE
EDGCSCRFPEEEEGGCELRVKFSRSADAPAYKQGQNQLYNELNLGRREEYDVLDKRRGR
DPEMGGKPRRKNPQEGLYNELQKDKMAEAYSEIGMKGERRRGKGHDGLYQGLSTATKD
TYDALHMQALPPRGSGATNFSLLKQAGDVEENPGPMALPVTALLLPLALLLHAARPSLF
NQEVQIPLTESYCGPCPKNWICYKNNCYQFFDESKNWYESQASCMSQNASLLKVYSKED
QDLLKLVKSYHWMGLVHIPTNGSWQWEDGSILSPNLLTIIEMQKGDCALYASSFKGYIEN
CSTPNTYICMQRTVSDPTRVETATETAWISLVTALHLVLGLSAVLGLLLLRWQFPAHYRRL
RHALWPSLPDLHRVLGQYLRDTAALSPPKATVSDTCEEVEPSLLEILPKSSERTPLPLLELG
PWSPEVPSTLEVYSCHPPRSPAKRLQLTELQEPAELVESDGVPKPSFWPTAQNSGGSAYSE
ERDRPYGLVSIDTVTVLDAEGPCTWPCSCEDDGYPALDLDAGLEPSECDFTSPGDEGPPR
SYLRQWVVIPPPLSSPGPQASEKQASSFDFNGPYLGPPHSRSLPDILGQPEPPQEGGSQKSP
PPGSLEYLCLPAGGQVQLVPLAQDTEDPGVASGYVSSADLVFTPNSGASSVSGPPGAPGP
VKSGFEGYVELPPIEGRSPRSQPEGLLVLQQVGDYCFLPGLGPGPLSLRSKQVPVIQLFKA
LKQQDYLSLPPWEVNKPGEVC
SEQ ID NO: 116 (BM NKG2D-IL-23R-2-GM-CSFRα amino acid sequence)
MALPVTALLLPLALLLHAARPDVVMTQSPLSLPVTPGEPASISCRSSQSLVHSNANTYLH
WYLQKPGQSPQLLIYKVSNRFSGVPDRFSGSGSGTDFTLKISRVEAEDVGVYYCSQNTH
VPPTFGQGTKLEIKRGGGGSGGGGSGGGGSQVQLVQSGAEVKKPGASVKVSCKASGYT
FTDYEMHWVRQAPGQGLEWMGALDPKTGDTAYSQKFKGRVTLTADESTSTAYMELSSL
RSEDTAVYYCTRFYSYTYWGQGTLVTVSSTTTPAPRPPTPAPTIASQPLSLRPEACRPAAG
GAVHTRGLDFACDIYIWAPLAGTCGVLLLSLVITLYCKRGRKKLLYIFKQPFMRPVQTTQE
EDGCSCRFPEEEEGGCELRVKFSRSADAPAYKQGQNQLYNELNLGRREEYDVLDKRRGR
DPEMGGKPRRKNPQEGLYNELQKDKMAEAYSEIGMKGERRRGKGHDGLYQGLSTATKD
TYDALHMQALPPRGSGATNFSLLKQAGDVEENPGPMALPVTALLLPLALLLHAARPSLF
NQEVQIPLTESYCGPCPKNWICYKNNCYQFFDESKNWYESQASCMSQNASLLKVYSKED
QDLLKLVKSYHWMGLVHIPTNGSWQWEDGSILSPNLLTIIEMQKGDCALYASSFKGYIEN
CSTPNTYICMQRTVSDPTRVETATETAWISLVTALHLVLGLSAVLGLLLLRWQFPAHYRRL
RHALWPSLPDLHRVLGQYLRDTAALSPPKATVSDTCEEVEPSLLEILPKSSERTPLPLEFVS
CLGIVNEELPSINTYFPQNILESHFNRISEVEDEIIWEEFTPEEGKGYREEVLTVKEIT
SEQ ID NO: 117 (BM NKG2D-IL-23R-2-GM-CSFRβ-1 amino acid sequence)
MALPVTALLLPLALLLHAARPDVVMTQSPLSLPVTPGEPASISCRSSQSLVHSNANTYLH
WYLQKPGQSPQLLIYKVSNRFSGVPDRFSGSGSGTDFTLKISRVEAEDVGVYYCSQNTH
VPPTFGQGTKLEIKRGGGGSGGGGSGGGGSQVQLVQSGAEVKKPGASVKVSCKASGYT
FTDYEMHWVRQAPGQGLEWMGALDPKTGDTAYSQKFKGRVTLTADESTSTAYMELSSL
RSEDTAVYYCTRFYSYTYWGQGTLVTVSSTTTPAPRPPTPAPTIASQPLSLRPEACRPAAG
GAVHTRGLDFACDIYIWAPLAGTCGVLLLSLVITLYCKRGRKKLLYIFKQPFMRPVQTTQE
EDGCSCRFPEEEEGGCELRVKFSRSADAPAYKQGQNQLYNELNLGRREEYDVLDKRRGR
DPEMGGKPRRKNPQEGLYNELQKDKMAEAYSEIGMKGERRRGKGHDGLYQGLSTATKD
TYDALHMQALPPRGSGATNFSLLKQAGDVEENPGPMALPVTALLLPLALLLHAARPSLF
NQEVQIPLTESYCGPCPKNWICYKNNCYQFFDESKNWYESQASCMSQNASLLKVYSKED
QDLLKLVKSYHWMGLVHIPTNGSWQWEDGSILSPNLLTIIEMQKGDCALYASSFKGYIEN
CSTPNTYICMQRTVSDPTRVETATETAWISLVTALHLVLGLSAVLGLLLLRWQFPAHYRRL
RHALWPSLPDLHRVLGQYLRDTAALSPPKATVSDTCEEVEPSLLEILPKSSERTPLPLEFVS
CLGIVNEELPSINTYFPQNILESHFNRISDTEDPGVASGYVSSADLVFTPNSGASSVSGPPG
APGPVKSGFEGYVELPPIEGRSPRSQPEGLLVLQQVGDYCFLPGLGPGPLSLRSKQVPVIQ
LFKALKQQDYLSLPPWEVNKPGEVC
SEQ ID NO: 118 (BM NKG2D-IL-23R-2-GM-CSFRβ-2 amino acid sequence)
MALPVTALLLPLALLLHAARPDVVMTQSPLSLPVTPGEPASISCRSSQSLVHSNANTYLH
WYLQKPGQSPQLLIYKVSNRFSGVPDRFSGSGSGTDFTLKISRVEAEDVGVYYCSQNTH
VPPTFGQGTKLEIKRGGGGSGGGGSGGGGSQVQLVQSGAEVKKPGASVKVSCKASGYT
FTDYEMHWVRQAPGQGLEWMGALDPKTGDTAYSQKFKGRVTLTADESTSTAYMELSSL
RSEDTAVYYCTRFYSYTYWGQGTLVTVSSTTTPAPRPPTPAPTIASQPLSLRPEACRPAAG
GAVHTRGLDFACDIYIWAPLAGTCGVLLLSLVITLYCKRGRKKLLYIFKQPFMRPVQTTQE
EDGCSCRFPEEEEGGCELRVKFSRSADAPAYKQGQNQLYNELNLGRREEYDVLDKRRGR
DPEMGGKPRRKNPQEGLYNELQKDKMAEAYSEIGMKGERRRGKGHDGLYQGLSTATKD
TYDALHMQALPPRGSGATNFSLLKQAGDVEENPGPMALPVTALLLPLALLLHAARPSLF
NQEVQIPLTESYCGPCPKNWICYKNNCYQFFDESKNWYESQASCMSQNASLLKVYSKED
QDLLKLVKSYHWMGLVHIPTNGSWQWEDGSILSPNLLTIIEMQKGDCALYASSFKGYIEN
CSTPNTYICMQRTVSDPTRVETATETAWISLVTALHLVLGLSAVLGLLLLRWQFPAHYRRL
RHALWPSLPDLHRVLGQYLRDTAALSPPKATVSDTCEEVEPSLLEILPKSSERTPLPLEFVS
CLGIVNEELPSINTYFPQNILESHENRISEKQASSFDFNGPYLGPPHSRSLPDILGQPEPPQE
GGSQKSPPPGSLEYLCLPAGGQVQLVPLAQDTEDPGVASGYVSSADLVFTPNSGASSVSG
PPGAPGPVKSGFEGYVELPPIEGRSPRSQPEGLLVLQQVGDYCFLPGLGPGPLSLRSKQVP
VIQLFKALKQQDYLSLPPWEVNKPGEVC
SEQ ID NO: 119 (BM NKG2D-IL-7Rα-IL-9R-2 amino acid sequence)
MALPVTALLLPLALLLHAARPDVVMTQSPLSLPVTPGEPASISCRSSQSLVHSNANTYLH
WYLQKPGQSPQLLIYKVSNRFSGVPDRFSGSGSGTDFTLKISRVEAEDVGVYYCSQNTH
VPPTFGQGTKLEIKRGGGGSGGGGSGGGGSQVQLVQSGAEVKKPGASVKVSCKASGYT
FTDYEMHWVRQAPGQGLEWMGALDPKTGDTAYSQKFKGRVTLTADESTSTAYMELSSL
RSEDTAVYYCTRFYSYTYWGQGTLVTVSSTTTPAPRPPTPAPTIASQPLSLRPEACRPAAG
GAVHTRGLDFACDIYIWAPLAGTCGVLLLSLVITLYCKRGRKKLLYIFKQPFMRPVQTTQE
EDGCSCRFPEEEEGGCELRVKFSRSADAPAYKQGQNQLYNELNLGRREEYDVLDKRRGR
DPEMGGKPRRKNPQEGLYNELQKDKMAEAYSEIGMKGERRRGKGHDGLYQGLSTATKD
TYDALHMQALPPRGSGATNFSLLKQAGDVEENPGPMALPVTALLLPLALLLHAARPSLF
NQEVQIPLTESYCGPCPKNWICYKNNCYQFFDESKNWYESQASCMSQNASLLKVYSKED
QDLLKLVKSYHWMGLVHIPTNGSWQWEDGSILSPNLLTIIEMQKGDCALYASSFKGYIEN
CSTPNTYICMQRTVSDPTRVETATETAWISLVTALHLVLGLSAVLGLLLLRWQFPAHYRRL
RHALWPSLPDLHRVLGQYLRDTAALSPPKATVSDTCEEVEPSLLEILPKSSERTPLPLARD
EVEGFLQDTFPQQLEESEKQRLGGDVQSPNCPSEDVVITPESFGRDSSLTCLAGNVSACD
APILSSSRSLDCRESGKNGPHVYQDLLLSLGTTNSTLPPPFSLQSGILTLNPVAQGQPILTSL
GSNQEEAYVTMSSFYQNQDVLPAGCTEWRVQTLAYLPQEDWAPTSLTRPAPPDSEGSRSS
SSSSSSNNNNYCALGCYGGWHLSALPGNTQSS
SEQ ID NO: 120 (BM NKG2D-IL12Rβ1-IL-9R-2 amino acid sequence)
MALPVTALLLPLALLLHAARPDVVMTQSPLSLPVTPGEPASISCRSSQSLVHSNANTYLH
WYLQKPGQSPQLLIYKVSNRFSGVPDRFSGSGSGTDFTLKISRVEAEDVGVYYCSQNTH
VPPTFGQGTKLEIKRGGGGSGGGGSGGGGSQVQLVQSGAEVKKPGASVKVSCKASGYT
FTDYEMHWVRQAPGQGLEWMGALDPKTGDTAYSQKFKGRVTLTADESTSTAYMELSSL
RSEDTAVYYCTRFYSYTYWGQGTLVTVSSTTTPAPRPPTPAPTIASQPLSLRPEACRPAAG
GAVHTRGLDFACDIYIWAPLAGTCGVLLLSLVITLYCKRGRKKLLYIFKQPFMRPVQTTQE
EDGCSCRFPEEEEGGCELRVKFSRSADAPAYKQGQNQLYNELNLGRREEYDVLDKRRGR
DPEMGGKPRRKNPQEGLYNELQKDKMAEAYSEIGMKGERRRGKGHDGLYQGLSTATKD
TYDALHMQALPPRGSGATNFSLLKQAGDVEENPGPMALPVTALLLPLALLLHAARPSLF
NQEVQIPLTESYCGPCPKNWICYKNNCYQFFDESKNWYESQASCMSQNASLLKVYSKED
QDLLKLVKSYHWMGLVHIPTNGSWQWEDGSILSPNLLTIIEMQKGDCALYASSFKGYIEN
CSTPNTYICMQRTVSDPTRVETATETAWISLVTALHLVLGLSAVLGLLLLRWQFPAHYRRL
RHALWPSLPDLHRVLGQYLRDTAALSPPKATVSDTCEEVEPSLLEILPKSSERTPLPLSLQE
ALVVEMSWDKGERTEPLEKTELPEGAPELALDTELSLEDGDRCKAKMDVLPAGCTEWR
VQTLAYLPQEDWAPTSLTRPAPPDSEGSRSSSSSSSSNNNNYCALGCYGGWHLSALPGNT
QSS
SEQ ID NO: 121 (BM NKG2D-IL12Rβ2-IL-9R-2 amino acid sequence)
MALPVTALLLPLALLLHAARPDVVMTQSPLSLPVTPGEPASISCRSSQSLVHSNANTYLH
WYLQKPGQSPQLLIYKVSNRFSGVPDRFSGSGSGTDFTLKISRVEAEDVGVYYCSQNTH
VPPTFGQGTKLEIKRGGGGSGGGGSGGGGSQVQLVQSGAEVKKPGASVKVSCKASGYT
FTDYEMHWVRQAPGQGLEWMGALDPKTGDTAYSQKFKGRVTLTADESTSTAYMELSSL
RSEDTAVYYCTRFYSYTYWGQGTLVTVSSTTTPAPRPPTPAPTIASQPLSLRPEACRPAAG
GAVHTRGLDFACDIYIWAPLAGTCGVLLLSLVITLYCKRGRKKLLYIFKQPFMRPVQTTQE
EDGCSCRFPEEEEGGCELRVKFSRSADAPAYKQGQNQLYNELNLGRREEYDVLDKRRGR
DPEMGGKPRRKNPQEGLYNELQKDKMAEAYSEIGMKGERRRGKGHDGLYQGLSTATKD
TYDALHMQALPPRGSGATNFSLLKQAGDVEENPGPMALPVTALLLPLALLLHAARPSLF
NQEVQIPLTESYCGPCPKNWICYKNNCYQFFDESKNWYESQASCMSQNASLLKVYSKED
QDLLKLVKSYHWMGLVHIPTNGSWQWEDGSILSPNLLTIIEMQKGDCALYASSFKGYIEN
CSTPNTYICMQRTVSDPTRVETATETAWISLVTALHLVLGLSAVLGLLLLRWQFPAHYRRL
RHALWPSLPDLHRVLGQYLRDTAALSPPKATVSDTCEEVEPSLLEILPKSSERTPLPLSDPK
PENPACPWTVLPAGDLPTHDGYLPSNIDDLPSHEAPLADSLEELEPQDVLPAGCTEWRVQ
TLAYLPQEDWAPTSLTRPAPPDSEGSRSSSSSSSSNNNNYCALGCYGGWHLSALPGNTQS
S
SEQ ID NO: 122 (BM NKG2D-IL15Rα-IL-9R-2 amino acid sequence)
MALPVTALLLPLALLLHAARPDVVMTQSPLSLPVTPGEPASISCRSSQSLVHSNANTYLH
WYLQKPGQSPQLLIYKVSNRFSGVPDRFSGSGSGTDFTLKISRVEAEDVGVYYCSQNTH
VPPTFGQGTKLEIKRGGGGSGGGGSGGGGSQVQLVQSGAEVKKPGASVKVSCKASGYT
FTDYEMHWVRQAPGQGLEWMGALDPKTGDTAYSQKFKGRVTLTADESTSTAYMELSSL
RSEDTAVYYCTRFYSYTYWGQGTLVTVSSTTTPAPRPPTPAPTIASQPLSLRPEACRPAAG
GAVHTRGLDFACDIYIWAPLAGTCGVLLLSLVITLYCKRGRKKLLYIFKQPFMRPVQTTQE
EDGCSCRFPEEEEGGCELRVKFSRSADAPAYKQGQNQLYNELNLGRREEYDVLDKRRGR
DPEMGGKPRRKNPQEGLYNELQKDKMAEAYSEIGMKGERRRGKGHDGLYQGLSTATKD
TYDALHMQALPPRGSGATNFSLLKQAGDVEENPGPMALPVTALLLPLALLLHAARPSLF
NQEVQIPLTESYCGPCPKNWICYKNNCYQFFDESKNWYESQASCMSQNASLLKVYSKED
QDLLKLVKSYHWMGLVHIPTNGSWQWEDGSILSPNLLTIIEMQKGDCALYASSFKGYIEN
CSTPNTYICMQRTVSDPTRVETATETAWISLVTALHLVLGLSAVLGLLLLRWQFPAHYRRL
RHALWPSLPDLHRVLGQYLRDTAALSPPKATVSDTCEEVEPSLLEILPKSSERTPLPLKSR
QTPPLASVEMEAMEALPVTWGTSSRDEDLENCSHHLDVLPAGCTEWRVQTLAYLPQED
WAPTSLTRPAPPDSEGSRSSSSSSSSNNNNYCALGCYGGWHLSALPGNTQSS
SEQ ID NO: 123 (BM NKG2D-IL15Rβ-1-IL-9R-2 amino acid sequence)
MALPVTALLLPLALLLHAARPDVVMTQSPLSLPVTPGEPASISCRSSQSLVHSNANTYLH
WYLQKPGQSPQLLIYKVSNRFSGVPDRFSGSGSGTDFTLKISRVEAEDVGVYYCSQNTH
VPPTFGQGTKLEIKRGGGGSGGGGSGGGGSQVQLVQSGAEVKKPGASVKVSCKASGYT
FTDYEMHWVRQAPGQGLEWMGALDPKTGDTAYSQKFKGRVTLTADESTSTAYMELSSL
RSEDTAVYYCTRFYSYTYWGQGTLVTVSSTTTPAPRPPTPAPTIASQPLSLRPEACRPAAG
GAVHTRGLDFACDIYIWAPLAGTCGVLLLSLVITLYCKRGRKKLLYIFKQPFMRPVQTTQE
EDGCSCRFPEEEEGGCELRVKFSRSADAPAYKQGQNQLYNELNLGRREEYDVLDKRRGR
DPEMGGKPRRKNPQEGLYNELQKDKMAEAYSEIGMKGERRRGKGHDGLYQGLSTATKD
TYDALHMQALPPRGSGATNFSLLKQAGDVEENPGPMALPVTALLLPLALLLHAARPSLF
NQEVQIPLTESYCGPCPKNWICYKNNCYQFFDESKNWYESQASCMSQNASLLKVYSKED
QDLLKLVKSYHWMGLVHIPTNGSWQWEDGSILSPNLLTIIEMQKGDCALYASSFKGYIEN
CSTPNTYICMQRTVSDPTRVETATETAWISLVTALHLVLGLSAVLGLLLLRWQFPAHYRRL
RHALWPSLPDLHRVLGQYLRDTAALSPPKATVSDTCEEVEPSLLEILPKSSERTPLPLVTQL
LLQQDKVPEPASLSSNHSLTSCFTNQGYFFFHLPDALEIEACQVYFTYDPYSEEDPDEGVA
GAPTGSSPQPLQPLSGEDDAYCTFPSRDDLLLFSPSLLGGPSPPSTAPGGSGAGEERMPPSL
QERVPRDWDPQPLGPPTPGVPDLVDFQPPPELVLREAGEEVPDAGPREGVSFPWSRPPGQ
GEFRALNARLPLNTDAYLSLQELQGQDPTHLVDVLPAGCTEWRVQTLAYLPQEDWAPTS
LTRPAPPDSEGSRSSSSSSSSNNNNYCALGCYGGWHLSALPGNTQSS
SEQ ID NO: 124 (BM NKG2D-IL15Rβ-2-IL-9R-2 amino acid sequence)
MALPVTALLLPLALLLHAARPDVVMTQSPLSLPVTPGEPASISCRSSQSLVHSNANTYLH
WYLQKPGQSPQLLIYKVSNRFSGVPDRFSGSGSGTDFTLKISRVEAEDVGVYYCSQNTH
VPPTFGQGTKLEIKRGGGGSGGGGSGGGGSQVQLVQSGAEVKKPGASVKVSCKASGYT
FTDYEMHWVRQAPGQGLEWMGALDPKTGDTAYSQKFKGRVTLTADESTSTAYMELSSL
RSEDTAVYYCTRFYSYTYWGQGTLVTVSSTTTPAPRPPTPAPTIASQPLSLRPEACRPAAG
GAVHTRGLDFACDIYIWAPLAGTCGVLLLSLVITLYCKRGRKKLLYIFKQPFMRPVQTTQE
EDGCSCRFPEEEEGGCELRVKFSRSADAPAYKQGQNQLYNELNLGRREEYDVLDKRRGR
DPEMGGKPRRKNPQEGLYNELQKDKMAEAYSEIGMKGERRRGKGHDGLYQGLSTATKD
TYDALHMQALPPRGSGATNFSLLKQAGDVEENPGPMALPVTALLLPLALLLHAARPSLF
NQEVQIPLTESYCGPCPKNWICYKNNCYQFFDESKNWYESQASCMSQNASLLKVYSKED
QDLLKLVKSYHWMGLVHIPTNGSWQWEDGSILSPNLLTIIEMQKGDCALYASSFKGYIEN
CSTPNTYICMQRTVSDPTRVETATETAWISLVTALHLVLGLSAVLGLLLLRWQFPAHYRRL
RHALWPSLPDLHRVLGQYLRDTAALSPPKATVSDTCEEVEPSLLEILPKSSERTPLPLEPAS
LSSNHSLTSCFTNQGYFFFHLPDALEIEACQVYFTYDPYSEEDPDEGVAGAPTGSSPQPLQ
PLSGEDDAYCTFPSRDDLLLFSEFRALNARLPLNTDAYLSLQELQGQDPTHLVDVLPAGC
TEWRVQTLAYLPQEDWAPTSLTRPAPPDSEGSRSSSSSSSSNNNNYCALGCYGGWHLSAL
PGNTQSS
SEQ ID NO: 125 (BM NKG2D-IL-21R-1-IL-9R-2 amino acid sequence)
MALPVTALLLPLALLLHAARPDVVMTQSPLSLPVTPGEPASISCRSSQSLVHSNANTYLH
WYLQKPGQSPQLLIYKVSNRFSGVPDRFSGSGSGTDFTLKISRVEAEDVGVYYCSQNTH
VPPTFGQGTKLEIKRGGGGSGGGGSGGGGSQVQLVQSGAEVKKPGASVKVSCKASGYT
FTDYEMHWVRQAPGQGLEWMGALDPKTGDTAYSQKFKGRVTLTADESTSTAYMELSSL
RSEDTAVYYCTRFYSYTYWGQGTLVTVSSTTTPAPRPPTPAPTIASQPLSLRPEACRPAAG
GAVHTRGLDFACDIYIWAPLAGTCGVLLLSLVITLYCKRGRKKLLYIFKQPFMRPVQTTQE
EDGCSCRFPEEEEGGCELRVKFSRSADAPAYKQGQNQLYNELNLGRREEYDVLDKRRGR
DPEMGGKPRRKNPQEGLYNELQKDKMAEAYSEIGMKGERRRGKGHDGLYQGLSTATKD
TYDALHMQALPPRGSGATNFSLLKQAGDVEENPGPMALPVTALLLPLALLLHAARPSLF
NQEVQIPLTESYCGPCPKNWICYKNNCYQFFDESKNWYESQASCMSQNASLLKVYSKED
QDLLKLVKSYHWMGLVHIPTNGSWQWEDGSILSPNLLTIIEMQKGDCALYASSFKGYIEN
CSTPNTYICMQRTVSDPTRVETATETAWISLVTALHLVLGLSAVLGLLLLRWQFPAHYRRL
RHALWPSLPDLHRVLGQYLRDTAALSPPKATVSDTCEEVEPSLLEILPKSSERTPLPLLELG
PWSPEVPSTLEVYSCHPPRSPAKRLQLTELQEPAELVESDGVPKPSFWPTAQNSGGSAYSE
ERDRPYGLVSIDTVTVLDAEGPCTWPCSCEDDGYPALDLDAGLEPSDVLPAGCTEWRVQ
TLAYLPQEDWAPTSLTRPAPPDSEGSRSSSSSSSSNNNNYCALGCYGGWHLSALPGNTQS
S
SEQ ID NO: 126 (BM NKG2D-IL-21R-2-IL-9R-2 amino acid sequence)
MALPVTALLLPLALLLHAARPDVVMTQSPLSLPVTPGEPASISCRSSQSLVHSNANTYLH
WYLQKPGQSPQLLIYKVSNRFSGVPDRFSGSGSGTDFTLKISRVEAEDVGVYYCSQNTH
VPPTFGQGTKLEIKRGGGGSGGGGSGGGGSQVQLVQSGAEVKKPGASVKVSCKASGYT
FTDYEMHWVRQAPGQGLEWMGALDPKTGDTAYSQKFKGRVTLTADESTSTAYMELSSL
RSEDTAVYYCTRFYSYTYWGQGTLVTVSSTTTPAPRPPTPAPTIASQPLSLRPEACRPAAG
GAVHTRGLDFACDIYIWAPLAGTCGVLLLSLVITLYCKRGRKKLLYIFKQPFMRPVQTTQE
EDGCSCRFPEEEEGGCELRVKFSRSADAPAYKQGQNQLYNELNLGRREEYDVLDKRRGR
DPEMGGKPRRKNPQEGLYNELQKDKMAEAYSEIGMKGERRRGKGHDGLYQGLSTATKD
TYDALHMQALPPRGSGATNFSLLKQAGDVEENPGPMALPVTALLLPLALLLHAARPSLF
NQEVQIPLTESYCGPCPKNWICYKNNCYQFFDESKNWYESQASCMSQNASLLKVYSKED
QDLLKLVKSYHWMGLVHIPTNGSWQWEDGSILSPNLLTIIEMQKGDCALYASSFKGYIEN
CSTPNTYICMQRTVSDPTRVETATETAWISLVTALHLVLGLSAVLGLLLLRWQFPAHYRRL
RHALWPSLPDLHRVLGQYLRDTAALSPPKATVSDTCEEVEPSLLEILPKSSERTPLPLECDF
TSPGDEGPPRSYLRQWVVIPPPLSSPGPQASDVLPAGCTEWRVQTLAYLPQEDWAPTSLT
RPAPPDSEGSRSSSSSSSSNNNNYCALGCYGGWHLSALPGNTQSS
SEQ ID NO: 127 (BM NKG2D-IL-21R-3-IL-9R-2 amino acid sequence)
MALPVTALLLPLALLLHAARPDVVMTQSPLSLPVTPGEPASISCRSSQSLVHSNANTYLH
WYLQKPGQSPQLLIYKVSNRFSGVPDRFSGSGSGTDFTLKISRVEAEDVGVYYCSQNTH
VPPTFGQGTKLEIKRGGGGSGGGGSGGGGSQVQLVQSGAEVKKPGASVKVSCKASGYT
FTDYEMHWVRQAPGQGLEWMGALDPKTGDTAYSQKFKGRVTLTADESTSTAYMELSSL
RSEDTAVYYCTRFYSYTYWGQGTLVTVSSTTTPAPRPPTPAPTIASQPLSLRPEACRPAAG
GAVHTRGLDFACDIYIWAPLAGTCGVLLLSLVITLYCKRGRKKLLYIFKQPFMRPVQTTQE
EDGCSCRFPEEEEGGCELRVKFSRSADAPAYKQGQNQLYNELNLGRREEYDVLDKRRGR
DPEMGGKPRRKNPQEGLYNELQKDKMAEAYSEIGMKGERRRGKGHDGLYQGLSTATKD
TYDALHMQALPPRGSGATNFSLLKQAGDVEENPGPMALPVTALLLPLALLLHAARPSLF
NQEVQIPLTESYCGPCPKNWICYKNNCYQFFDESKNWYESQASCMSQNASLLKVYSKED
QDLLKLVKSYHWMGLVHIPTNGSWQWEDGSILSPNLLTIIEMQKGDCALYASSFKGYIEN
CSTPNTYICMQRTVSDPTRVETATETAWISLVTALHLVLGLSAVLGLLLLRWQFPAHYRRL
RHALWPSLPDLHRVLGQYLRDTAALSPPKATVSDTCEEVEPSLLEILPKSSERTPLPLLELG
PWSPEVPSTLEVYSCHPPRSPAKRLQLTELQEPAELVESDGVPKPSFWPTAQNSGGSAYSE
ERDRPYGLVSIDTVTVLDAEGPCTWPCSCEDDGYPALDLDAGLEPSECDFTSPGDEGPPR
SYLRQWVVIPPPLSSPGPQASDVLPAGCTEWRVQTLAYLPQEDWAPTSLTRPAPPDSEGSR
SSSSSSSSNNNNYCALGCYGGWHLSALPGNTQSS
SEQ ID NO: 128 (BM NKG2D-IL-23R-2-IL-9R-2 amino acid sequence)
MALPVTALLLPLALLLHAARPDVVMTQSPLSLPVTPGEPASISCRSSQSLVHSNANTYLH
WYLQKPGQSPQLLIYKVSNRFSGVPDRFSGSGSGTDFTLKISRVEAEDVGVYYCSQNTH
VPPTFGQGTKLEIKRGGGGSGGGGSGGGGSQVQLVQSGAEVKKPGASVKVSCKASGYT
FTDYEMHWVRQAPGQGLEWMGALDPKTGDTAYSQKFKGRVTLTADESTSTAYMELSSL
RSEDTAVYYCTRFYSYTYWGQGTLVTVSSTTTPAPRPPTPAPTIASQPLSLRPEACRPAAG
GAVHTRGLDFACDIYIWAPLAGTCGVLLLSLVITLYCKRGRKKLLYIFKQPFMRPVQTTQE
EDGCSCRFPEEEEGGCELRVKFSRSADAPAYKQGQNQLYNELNLGRREEYDVLDKRRGR
DPEMGGKPRRKNPQEGLYNELQKDKMAEAYSEIGMKGERRRGKGHDGLYQGLSTATKD
TYDALHMQALPPRGSGATNFSLLKQAGDVEENPGPMALPVTALLLPLALLLHAARPSLF
NQEVQIPLTESYCGPCPKNWICYKNNCYQFFDESKNWYESQASCMSQNASLLKVYSKED
QDLLKLVKSYHWMGLVHIPTNGSWQWEDGSILSPNLLTIIEMQKGDCALYASSFKGYIEN
CSTPNTYICMQRTVSDPTRVETATETAWISLVTALHLVLGLSAVLGLLLLRWQFPAHYRRL
RHALWPSLPDLHRVLGQYLRDTAALSPPKATVSDTCEEVEPSLLEILPKSSERTPLPLEFVS
CLGIVNEELPSINTYFPQNILESHENRISDVLPAGCTEWRVQTLAYLPQEDWAPTSLTRPAP
PDSEGSRSSSSSSSSNNNNYCALGCYGGWHLSALPGNTQSS
SEQ ID NO: 129 (BM NKG2D-GM-CSFRα-IL-9R-2 amino acid sequence)
MALPVTALLLPLALLLHAARPDVVMTQSPLSLPVTPGEPASISCRSSQSLVHSNANTYLH
WYLQKPGQSPQLLIYKVSNRFSGVPDRFSGSGSGTDFTLKISRVEAEDVGVYYCSQNTH
VPPTFGQGTKLEIKRGGGGSGGGGSGGGGSQVQLVQSGAEVKKPGASVKVSCKASGYT
FTDYEMHWVRQAPGQGLEWMGALDPKTGDTAYSQKFKGRVTLTADESTSTAYMELSSL
RSEDTAVYYCTRFYSYTYWGQGTLVTVSSTTTPAPRPPTPAPTIASQPLSLRPEACRPAAG
GAVHTRGLDFACDIYIWAPLAGTCGVLLLSLVITLYCKRGRKKLLYIFKQPFMRPVQTTQE
EDGCSCRFPEEEEGGCELRVKFSRSADAPAYKQGQNQLYNELNLGRREEYDVLDKRRGR
DPEMGGKPRRKNPQEGLYNELQKDKMAEAYSEIGMKGERRRGKGHDGLYQGLSTATKD
TYDALHMQALPPRGSGATNFSLLKQAGDVEENPGPMALPVTALLLPLALLLHAARPSLF
NQEVQIPLTESYCGPCPKNWICYKNNCYQFFDESKNWYESQASCMSQNASLLKVYSKED
QDLLKLVKSYHWMGLVHIPTNGSWQWEDGSILSPNLLTIIEMQKGDCALYASSFKGYIEN
CSTPNTYICMQRTVSDPTRVETATETAWISLVTALHLVLGLSAVLGLLLLRWQFPAHYRRL
RHALWPSLPDLHRVLGQYLRDTAALSPPKATVSDTCEEVEPSLLEILPKSSERTPLPLEVE
DEITWEEFTPEEGKGYREEVLTVKEITDVLPAGCTEWRVQTLAYLPQEDWAPTSLTRPAPP
DSEGSRSSSSSSSSNNNNYCALGCYGGWHLSALPGNTQSS
SEQ ID NO: 130 (BM NKG2D-GM-CSFRβ-1-IL-9R-2 amino acid sequence)
MALPVTALLLPLALLLHAARPDVVMTQSPLSLPVTPGEPASISCRSSQSLVHSNANTYLH
WYLQKPGQSPQLLIYKVSNRFSGVPDRFSGSGSGTDFTLKISRVEAEDVGVYYCSQNTH
VPPTFGQGTKLEIKRGGGGSGGGGSGGGGSQVQLVQSGAEVKKPGASVKVSCKASGYT
FTDYEMHWVRQAPGQGLEWMGALDPKTGDTAYSQKFKGRVTLTADESTSTAYMELSSL
RSEDTAVYYCTRFYSYTYWGQGTLVTVSSTTTPAPRPPTPAPTIASQPLSLRPEACRPAAG
GAVHTRGLDFACDIYIWAPLAGTCGVLLLSLVITLYCKRGRKKLLYIFKQPFMRPVQTTQE
EDGCSCRFPEEEEGGCELRVKFSRSADAPAYKQGQNQLYNELNLGRREEYDVLDKRRGR
DPEMGGKPRRKNPQEGLYNELQKDKMAEAYSEIGMKGERRRGKGHDGLYQGLSTATKD
TYDALHMQALPPRGSGATNFSLLKQAGDVEENPGPMALPVTALLLPLALLLHAARPSLF
NQEVQIPLTESYCGPCPKNWICYKNNCYQFFDESKNWYESQASCMSQNASLLKVYSKED
QDLLKLVKSYHWMGLVHIPTNGSWQWEDGSILSPNLLTIIEMQKGDCALYASSFKGYIEN
CSTPNTYICMQRTVSDPTRVETATETAWISLVTALHLVLGLSAVLGLLLLRWQFPAHYRRL
RHALWPSLPDLHRVLGQYLRDTAALSPPKATVSDTCEEVEPSLLEILPKSSERTPLPLDTE
DPGVASGYVSSADLVFTPNSGASSVSGPPGAPGPVKSGFEGYVELPPIEGRSPRSQPEGLL
VLQQVGDYCFLPGLGPGPLSLRSKQVPVIQLFKALKQQDYLSLPPWEVNKPGEVCDVLP
AGCTEWRVQTLAYLPQEDWAPTSLTRPAPPDSEGSRSSSSSSSSNNNNYCALGCYGGWH
LSALPGNTQSS
SEQ ID NO: 131 (BM NKG2D-GM-CSFRβ-2-IL-9R-2 amino acid sequence)
MALPVTALLLPLALLLHAARPDVVMTQSPLSLPVTPGEPASISCRSSQSLVHSNANTYLH
WYLQKPGQSPQLLIYKVSNRFSGVPDRFSGSGSGTDFTLKISRVEAEDVGVYYCSQNTH
VPPTFGQGTKLEIKRGGGGSGGGGSGGGGSQVQLVQSGAEVKKPGASVKVSCKASGYT
FTDYEMHWVRQAPGQGLEWMGALDPKTGDTAYSQKFKGRVTLTADESTSTAYMELSSL
RSEDTAVYYCTRFYSYTYWGQGTLVTVSSTTTPAPRPPTPAPTIASQPLSLRPEACRPAAG
GAVHTRGLDFACDIYIWAPLAGTCGVLLLSLVITLYCKRGRKKLLYIFKQPFMRPVQTTQE
EDGCSCRFPEEEEGGCELRVKFSRSADAPAYKQGQNQLYNELNLGRREEYDVLDKRRGR
DPEMGGKPRRKNPQEGLYNELQKDKMAEAYSEIGMKGERRRGKGHDGLYQGLSTATKD
TYDALHMQALPPRGSGATNFSLLKQAGDVEENPGPMALPVTALLLPLALLLHAARPSLF
NQEVQIPLTESYCGPCPKNWICYKNNCYQFFDESKNWYESQASCMSQNASLLKVYSKED
QDLLKLVKSYHWMGLVHIPTNGSWQWEDGSILSPNLLTIIEMQKGDCALYASSFKGYIEN
CSTPNTYICMQRTVSDPTRVETATETAWISLVTALHLVLGLSAVLGLLLLRWQFPAHYRRL
RHALWPSLPDLHRVLGQYLRDTAALSPPKATVSDTCEEVEPSLLEILPKSSERTPLPLEKQ
ASSFDFNGPYLGPPHSRSLPDILGQPEPPQEGGSQKSPPPGSLEYLCLPAGGQVQLVPLAQ
DTEDPGVASGYVSSADLVFTPNSGASSVSGPPGAPGPVKSGFEGYVELPPIEGRSPRSQPE
GLLVLQQVGDYCFLPGLGPGPLSLRSKQVPVIQLFKALKQQDYLSLPPWEVNKPGEVCD
VLPAGCTEWRVQTLAYLPQEDWAPTSLTRPAPPDSEGSRSSSSSSSSNNNNYCALGCYGG
WHLSALPGNTQSS
SEQ ID NO: 132 (BM truncated NKG2D (89-216)-IL15Rβ-1-IL-23R-2 amino acid
sequence)
MALPVTALLLPLALLLHAARPDVVMTQSPLSLPVTPGEPASISCRSSQSLVHSNANTYLH
WYLQKPGQSPQLLIYKVSNRFSGVPDRFSGSGSGTDFTLKISRVEAEDVGVYYCSQNTH
VPPTFGQGTKLEIKRGGGGSGGGGSGGGGSQVQLVQSGAEVKKPGASVKVSCKASGYT
FTDYEMHWVRQAPGQGLEWMGALDPKTGDTAYSQKFKGRVTLTADESTSTAYMELSSL
RSEDTAVYYCTRFYSYTYWGQGTLVTVSSTTTPAPRPPTPAPTIASQPLSLRPEACRPAAG
GAVHTRGLDFACDIYIWAPLAGTCGVLLLSLVITLYCKRGRKKLLYIFKQPFMRPVQTTQE
EDGCSCRFPEEEEGGCELRVKFSRSADAPAYKQGQNQLYNELNLGRREEYDVLDKRRGR
DPEMGGKPRRKNPQEGLYNELQKDKMAEAYSEIGMKGERRRGKGHDGLYQGLSTATKD
TYDALHMQALPPRGSGATNFSLLKQAGDVEENPGPMALPVTALLLPLALLLHAARPIPLT
ESYCGPCPKNWICYKNNCYQFFDESKNWYESQASCMSQNASLLKVYSKEDQDLLKLVK
SYHWMGLVHIPTNGSWQWEDGSILSPNLLTIIEMQKGDCALYASSFKGYIENCSTPNTYIC
MQRTVSDPTRVETATETAWISLVTALHLVLGLSAVLGLLLLRWQFPAHYRRLRHALWPSL
PDLHRVLGQYLRDTAALSPPKATVSDTCEEVEPSLLEILPKSSERTPLPLVTQLLLQQDKV
PEPASLSSNHSLTSCFTNQGYFFFHLPDALEIEACQVYFTYDPYSEEDPDEGVAGAPTGSSP
QPLQPLSGEDDAYCTFPSRDDLLLFSPSLLGGPSPPSTAPGGSGAGEERMPPSLQERVPRD
WDPQPLGPPTPGVPDLVDFQPPPELVLREAGEEVPDAGPREGVSFPWSRPPGQGEFRALN
ARLPLNTDAYLSLQELQGQDPTHLVEFVSCLGIVNEELPSINTYFPQNILESHENRIS
SEQ ID NO: 133 (BM truncated NKG2D (98-216)-IL15Rβ-1-IL-23R-2 amino acid
sequence)
MALPVTALLLPLALLLHAARPDVVMTQSPLSLPVTPGEPASISCRSSQSLVHSNANTYLH
WYLQKPGQSPQLLIYKVSNRFSGVPDRFSGSGSGTDFTLKISRVEAEDVGVYYCSQNTH
VPPTFGQGTKLEIKRGGGGSGGGGSGGGGSQVQLVQSGAEVKKPGASVKVSCKASGYT
FTDYEMHWVRQAPGQGLEWMGALDPKTGDTAYSQKFKGRVTLTADESTSTAYMELSSL
RSEDTAVYYCTRFYSYTYWGQGTLVTVSSTTTPAPRPPTPAPTIASQPLSLRPEACRPAAG
GAVHTRGLDFACDIYIWAPLAGTCGVLLLSLVITLYCKRGRKKLLYIFKQPFMRPVQTTQE
EDGCSCRFPEEEEGGCELRVKFSRSADAPAYKQGQNQLYNELNLGRREEYDVLDKRRGR
DPEMGGKPRRKNPQEGLYNELQKDKMAEAYSEIGMKGERRRGKGHDGLYQGLSTATKD
TYDALHMQALPPRGSGATNFSLLKQAGDVEENPGPMALPVTALLLPLALLLHAARPPCP
KNWICYKNNCYQFFDESKNWYESQASCMSQNASLLKVYSKEDQDLLKLVKSYHWMGL
VHIPTNGSWQWEDGSILSPNLLTIIEMQKGDCALYASSFKGYIENCSTPNTYICMQRTVSD
PTRVETATETAWISLVTALHLVLGLSAVLGLLLLRWQFPAHYRRLRHALWPSLPDLHRVLG
QYLRDTAALSPPKATVSDTCEEVEPSLLEILPKSSERTPLPLVTQLLLQQDKVPEPASLSSN
HSLTSCFTNQGYFFFHLPDALEIEACQVYFTYDPYSEEDPDEGVAGAPTGSSPQPLQPLSG
EDDAYCTFPSRDDLLLFSPSLLGGPSPPSTAPGGSGAGEERMPPSLQERVPRDWDPQPLGP
PTPGVPDLVDFQPPPELVLREAGEEVPDAGPREGVSFPWSRPPGQGEFRALNARLPLNTD
AYLSLQELQGQDPTHLVEFVSCLGIVNEELPSINTYFPQNILESHENRIS
SEQ ID NO: 134 (Anti-MIC-A/B scFv-IL7Rα-IL12Rβ2 amino acid sequence)
MALPVTALLLPLALLLHAARPDVVMTQSPLSLPVTPGEPASISCRSSQSLVHSNANTYLH
WYLQKPGQSPQLLIYKVSNRFSGVPDRFSGSGSGTDFTLKISRVEAEDVGVYYCSQNTH
VPPTFGQGTKLEIKRGGGGSGGGGSGGGGSQVQLVQSGAEVKKPGASVKVSCKASGYT
FTDYEMHWVRQAPGQGLEWMGALDPKTGDTAYSQKFKGRVTLTADESTSTAYMELSSL
RSEDTAVYYCTRFYSYTYWGQGTLVTVSSTTTPAPRPPTPAPTIASQPLSLRPEACRPAAG
GAVHTRGLDFACDIYIWAPLAGTCGVLLLSLVITLYCKRGRKKLLYIFKQPFMRPVQTTQE
EDGCSCRFPEEEEGGCELRVKFSRSADAPAYKQGQNQLYNELNLGRREEYDVLDKRRGR
DPEMGGKPRRKNPQEGLYNELQKDKMAEAYSEIGMKGERRRGKGHDGLYQGLSTATKD
TYDALHMQALPPRGSGATNFSLLKQAGDVEENPGPMALPVTALLLPLALLLHAARPQIQ
LVQSGPELKKPGETVKVSCKASGYMFTNYAMNWVKQAPEKGLKWMGWINTHTGDPT
YADDFKGRIAFSLETSASTAYLQINNLKNEDTATYFCVRTYGNYAMDYWGQGTSVTVSS
GGGGSGGGGSGGGGSDIQMTQTTSSLSASLGDRVTISCSASQDISNYLNWYQQKPDGTV
KLLIYDTSILHLGVPSRFSGSGSGTDYSLTISNLEPEDIATYYCQQYSKFPRTFGGGTTLEIK
SDPTRVETATETAWISLVTALHLVLGLSAVLGLLLLRWQFPAHYRRLRHALWPSLPDLHRV
LGQYLRDTAALSPPKATVSDTCEEVEPSLLEILPKSSERTPLPLARDEVEGFLQDTFPQQLE
ESEKQRLGGDVQSPNCPSEDVVITPESFGRDSSLTCLAGNVSACDAPILSSSRSLDCRESG
KNGPHVYQDLLLSLGTTNSTLPPPFSLQSGILTLNPVAQGQPILTSLGSNQEEAYVTMSSFY
QNQSDPKPENPACPWTVLPAGDLPTHDGYLPSNIDDLPSHEAPLADSLEELEPQ
SEQ ID NO: 135 (Construct 185 amino acid sequence)
MALPVTALLLPLALLLHAARPDIVMTQTPLSLSVTPGQPASISCRSSQSLVHSNGNTYLH
WYLQKPGQSPQLLIYKVSNRFSGVPDRFSGSGSGTDFTLKISRVEAEDVGVYYCSQNTH
VPPTFGQGTKVEIKGGGGSGGGGSGGGGSQVQLVQSGAEVKKPGASVKVSCKASGYTF
TDYEMHWVRQAPGQGLEWMGALDPKTGDTAYSQKFKGRVTLTADTSTSTVYMELSSL
RSEDTAVYYCTRFYSYTYWGQGTLVTVSSTTTPAPRPPTPAPTIASQPLSLRPEACRPAAG
GAVHTRGLDFACDIYIWAPLAGTCGVLLLSLVITLYCKRGRKKLLYIFKQPFMRPVQTTQE
EDGCSCRFPEEEEGGCELRVKFSRSADAPAYKQGQNQLYNELNLGRREEYDVLDKRRGR
DPEMGGKPRRKNPQEGLYNELQKDKMAEAYSEIGMKGERRRGKGHDGLYQGLSTATKD
TYDALHMQALPPR
SEQ ID NO: 136 (Construct 185-NKG2D-IL15Rβ-1-IL-21R-1 amino acid sequence)
MALPVTALLLPLALLLHAARPDIVMTQTPLSLSVTPGQPASISCRSSQSLVHSNGNTYLH
WYLQKPGQSPQLLIYKVSNRFSGVPDRFSGSGSGTDFTLKISRVEAEDVGVYYCSQNTH
VPPTFGQGTKVEIKGGGGSGGGGSGGGGSQVQLVQSGAEVKKPGASVKVSCKASGYTF
TDYEMHWVRQAPGQGLEWMGALDPKTGDTAYSQKFKGRVTLTADTSTSTVYMELSSL
RSEDTAVYYCTRFYSYTYWGQGTLVTVSSTTTPAPRPPTPAPTIASQPLSLRPEACRPAAG
GAVHTRGLDFACDIYIWAPLAGTCGVLLLSLVITLYCKRGRKKLLYIFKQPFMRPVQTTQE
EDGCSCRFPEEEEGGCELRVKFSRSADAPAYKQGQNQLYNELNLGRREEYDVLDKRRGR
DPEMGGKPRRKNPQEGLYNELQKDKMAEAYSEIGMKGERRRGKGHDGLYQGLSTATKD
TYDALHMQALPPRGSGATNFSLLKQAGDVEENPGPMALPVTALLLPLALLLHAARPSLF
NQEVQIPLTESYCGPCPKNWICYKNNCYQFFDESKNWYESQASCMSQNASLLKVYSKED
QDLLKLVKSYHWMGLVHIPTNGSWQWEDGSILSPNLLTIIEMQKGDCALYASSFKGYIEN
CSTPNTYICMQRTVSDPTRVETATETAWISLVTALHLVLGLSAVLGLLLLRWQFPAHYRRL
RHALWPSLPDLHRVLGQYLRDTAALSPPKATVSDTCEEVEPSLLEILPKSSERTPLPLVTQL
LLQQDKVPEPASLSSNHSLTSCFTNQGYFFFHLPDALEIEACQVYFTYDPYSEEDPDEGVA
GAPTGSSPQPLQPLSGEDDAYCTFPSRDDLLLFSPSLLGGPSPPSTAPGGSGAGEERMPPSL
QERVPRDWDPQPLGPPTPGVPDLVDFQPPPELVLREAGEEVPDAGPREGVSFPWSRPPGQ
GEFRALNARLPLNTDAYLSLQELQGQDPTHLVLELGPWSPEVPSTLEVYSCHPPRSPAKR
LQLTELQEPAELVESDGVPKPSFWPTAQNSGGSAYSEERDRPYGLVSIDTVTVLDAEGPCT
WPCSCEDDGYPALDLDAGLEPS
SEQ ID NO: 137 (Construct 185-NKG2D-IL15Rβ-2-IL-21R-2 amino acid sequence)
MALPVTALLLPLALLLHAARPDIVMTQTPLSLSVTPGQPASISCRSSQSLVHSNGNTYLH
WYLQKPGQSPQLLIYKVSNRFSGVPDRFSGSGSGTDFTLKISRVEAEDVGVYYCSQNTH
VPPTFGQGTKVEIKGGGGSGGGGSGGGGSQVQLVQSGAEVKKPGASVKVSCKASGYTF
TDYEMHWVRQAPGQGLEWMGALDPKTGDTAYSQKFKGRVTLTADTSTSTVYMELSSL
RSEDTAVYYCTRFYSYTYWGQGTLVTVSSTTTPAPRPPTPAPTIASQPLSLRPEACRPAAG
GAVHTRGLDFACDIYIWAPLAGTCGVLLLSLVITLYCKRGRKKLLYIFKQPFMRPVQTTQE
EDGCSCRFPEEEEGGCELRVKFSRSADAPAYKQGQNQLYNELNLGRREEYDVLDKRRGR
DPEMGGKPRRKNPQEGLYNELQKDKMAEAYSEIGMKGERRRGKGHDGLYQGLSTATKD
TYDALHMQALPPRGSGATNFSLLKQAGDVEENPGPMALPVTALLLPLALLLHAARPSLF
NQEVQIPLTESYCGPCPKNWICYKNNCYQFFDESKNWYESQASCMSQNASLLKVYSKED
QDLLKLVKSYHWMGLVHIPTNGSWQWEDGSILSPNLLTIIEMQKGDCALYASSFKGYIEN
CSTPNTYICMQRTVSDPTRVETATETAWISLVTALHLVLGLSAVLGLLLLRWQFPAHYRRL
RHALWPSLPDLHRVLGQYLRDTAALSPPKATVSDTCEEVEPSLLEILPKSSERTPLPLEPAS
LSSNHSLTSCFTNQGYFFFHLPDALEIEACQVYFTYDPYSEEDPDEGVAGAPTGSSPQPLQ
PLSGEDDAYCTFPSRDDLLLFSEFRALNARLPLNTDAYLSLQELQGQDPTHLVECDFTSPG
DEGPPRSYLRQWVVIPPPLSSPGPQAS
SEQ ID NO: 138 (Construct 185-NKG2D-IL15Rβ-2-IL-23R-2 amino acid sequence)
MALPVTALLLPLALLLHAARPDIVMTQTPLSLSVTPGQPASISCRSSQSLVHSNGNTYLH
WYLQKPGQSPQLLIYKVSNRFSGVPDRFSGSGSGTDFTLKISRVEAEDVGVYYCSQNTH
VPPTFGQGTKVEIKGGGGSGGGGSGGGGSQVQLVQSGAEVKKPGASVKVSCKASGYTF
TDYEMHWVRQAPGQGLEWMGALDPKTGDTAYSQKFKGRVTLTADTSTSTVYMELSSL
RSEDTAVYYCTRFYSYTYWGQGTLVTVSSTTTPAPRPPTPAPTIASQPLSLRPEACRPAAG
GAVHTRGLDFACDIYIWAPLAGTCGVLLLSLVITLYCKRGRKKLLYIFKQPFMRPVQTTQE
EDGCSCRFPEEEEGGCELRVKFSRSADAPAYKQGQNQLYNELNLGRREEYDVLDKRRGR
DPEMGGKPRRKNPQEGLYNELQKDKMAEAYSEIGMKGERRRGKGHDGLYQGLSTATKD
TYDALHMQALPPRGSGATNFSLLKQAGDVEENPGPMALPVTALLLPLALLLHAARPSLF
NQEVQIPLTESYCGPCPKNWICYKNNCYQFFDESKNWYESQASCMSQNASLLKVYSKED
QDLLKLVKSYHWMGLVHIPTNGSWQWEDGSILSPNLLTIIEMQKGDCALYASSFKGYIEN
CSTPNTYICMQRTVSDPTRVETATETAWISLVTALHLVLGLSAVLGLLLLRWQFPAHYRRL
RHALWPSLPDLHRVLGQYLRDTAALSPPKATVSDTCEEVEPSLLEILPKSSERTPLPLEPAS
LSSNHSLTSCFTNQGYFFFHLPDALEIEACQVYFTYDPYSEEDPDEGVAGAPTGSSPQPLQ
PLSGEDDAYCTFPSRDDLLLFSEFRALNARLPLNTDAYLSLQELQGQDPTHLVEFVSCLGI
VNEELPSINTYFPQNILESHENRIS
SEQ ID NO: 139 (Construct 185-NKG2D-IL15Rβ-2-GM-CSFRα amino acid sequence)
MALPVTALLLPLALLLHAARPDIVMTQTPLSLSVTPGQPASISCRSSQSLVHSNGNTYLH
WYLQKPGQSPQLLIYKVSNRFSGVPDRFSGSGSGTDFTLKISRVEAEDVGVYYCSQNTH
VPPTFGQGTKVEIKGGGGSGGGGSGGGGSQVQLVQSGAEVKKPGASVKVSCKASGYTF
TDYEMHWVRQAPGQGLEWMGALDPKTGDTAYSQKFKGRVTLTADTSTSTVYMELSSL
RSEDTAVYYCTRFYSYTYWGQGTLVTVSSTTTPAPRPPTPAPTIASQPLSLRPEACRPAAG
GAVHTRGLDFACDIYIWAPLAGTCGVLLLSLVITLYCKRGRKKLLYIFKQPFMRPVQTTQE
EDGCSCRFPEEEEGGCELRVKFSRSADAPAYKQGQNQLYNELNLGRREEYDVLDKRRGR
DPEMGGKPRRKNPQEGLYNELQKDKMAEAYSEIGMKGERRRGKGHDGLYQGLSTATKD
TYDALHMQALPPRGSGATNFSLLKQAGDVEENPGPMALPVTALLLPLALLLHAARPSLF
NQEVQIPLTESYCGPCPKNWICYKNNCYQFFDESKNWYESQASCMSQNASLLKVYSKED
QDLLKLVKSYHWMGLVHIPTNGSWQWEDGSILSPNLLTIIEMQKGDCALYASSFKGYIEN
CSTPNTYICMQRTVSDPTRVETATETAWISLVTALHLVLGLSAVLGLLLLRWQFPAHYRRL
RHALWPSLPDLHRVLGQYLRDTAALSPPKATVSDTCEEVEPSLLEILPKSSERTPLPLEPAS
LSSNHSLTSCFTNQGYFFFHLPDALEIEACQVYFTYDPYSEEDPDEGVAGAPTGSSPQPLQ
PLSGEDDAYCTFPSRDDLLLFSEFRALNARLPLNTDAYLSLQELQGQDPTHLVEVEDEIIW
EEFTPEEGKGYREEVLTVKEIT
SEQ ID NO: 140 (Construct 185-NKG2D-IL15Rβ-1-IL-9R-2 amino acid sequence)
MALPVTALLLPLALLLHAARPDIVMTQTPLSLSVTPGQPASISCRSSQSLVHSNGNTYLH
WYLQKPGQSPQLLIYKVSNRFSGVPDRFSGSGSGTDFTLKISRVEAEDVGVYYCSQNTH
VPPTFGQGTKVEIKGGGGSGGGGSGGGGSQVQLVQSGAEVKKPGASVKVSCKASGYTF
TDYEMHWVRQAPGQGLEWMGALDPKTGDTAYSQKFKGRVTLTADTSTSTVYMELSSL
RSEDTAVYYCTRFYSYTYWGQGTLVTVSSTTTPAPRPPTPAPTIASQPLSLRPEACRPAAG
GAVHTRGLDFACDIYIWAPLAGTCGVLLLSLVITLYCKRGRKKLLYIFKQPFMRPVQTTQE
EDGCSCRFPEEEEGGCELRVKFSRSADAPAYKQGQNQLYNELNLGRREEYDVLDKRRGR
DPEMGGKPRRKNPQEGLYNELQKDKMAEAYSEIGMKGERRRGKGHDGLYQGLSTATKD
TYDALHMQALPPRGSGATNFSLLKQAGDVEENPGPMALPVTALLLPLALLLHAARPSLF
NQEVQIPLTESYCGPCPKNWICYKNNCYQFFDESKNWYESQASCMSQNASLLKVYSKED
QDLLKLVKSYHWMGLVHIPTNGSWQWEDGSILSPNLLTIIEMQKGDCALYASSFKGYIEN
CSTPNTYICMQRTVSDPTRVETATETAWISLVTALHLVLGLSAVLGLLLLRWQFPAHYRRL
RHALWPSLPDLHRVLGQYLRDTAALSPPKATVSDTCEEVEPSLLEILPKSSERTPLPLVTQL
LLQQDKVPEPASLSSNHSLTSCFTNQGYFFFHLPDALEIEACQVYFTYDPYSEEDPDEGVA
GAPTGSSPQPLQPLSGEDDAYCTFPSRDDLLLFSPSLLGGPSPPSTAPGGSGAGEERMPPSL
QERVPRDWDPQPLGPPTPGVPDLVDFQPPPELVLREAGEEVPDAGPREGVSFPWSRPPGQ
GEFRALNARLPLNTDAYLSLQELQGQDPTHLVDVLPAGCTEWRVQTLAYLPQEDWAPTS
LTRPAPPDSEGSRSSSSSSSSNNNNYCALGCYGGWHLSALPGNTQSS
SEQ ID NO: 141 (CTL-019 amino acid sequence)
MALPVTALLLPLALLLHAARPDIQMTQTTSSLSASLGDRVTISCRASQDISKYLNWYQQK
PDGTVKLLIYHTSRLHSGVPSRFSGSGSGTDYSLTISNLEQEDIATYFCQQGNTLPYTFGG
GTKLEITGGGGSGGGGSGGGGSEVKLQESGPGLVAPSQSLSVTCTVSGVSLPDYGVSWIR
QPPRKGLEWLGVIWGSETTYYNSALKSRLTIIKDNSKSQVFLKMNSLQTDDTAIYYCAKH
YYYGGSYAMDYWGQGTSVTVSSTTTPAPRPPTPAPTIASQPLSLRPEACRPAAGGAVHTR
GLDFACDIYIWAPLAGTCGVLLLSLVITLYCKRGRKKLLYIFKQPFMRPVQTTQEEDGCSC
RFPEEEEGGCELRVKFSRSADAPAYKQGQNQLYNELNLGRREEYDVLDKRRGRDPEMG
GKPRRKNPQEGLYNELQKDKMAEAYSEIGMKGERRRGKGHDGLYQGLSTATKDTYDAL
HMQALPPR
SEQ ID NO: 142 (CTL-019-NKG2D-IL-7Rα-IL-12Rβ2 amino acid sequence)
MALPVTALLLPLALLLHAARPDIQMTQTTSSLSASLGDRVTISCRASQDISKYLNWYQQK
PDGTVKLLIYHTSRLHSGVPSRFSGSGSGTDYSLTISNLEQEDIATYFCQQGNTLPYTFGG
GTKLEITGGGGSGGGGSGGGGSEVKLQESGPGLVAPSQSLSVTCTVSGVSLPDYGVSWIR
QPPRKGLEWLGVIWGSETTYYNSALKSRLTIIKDNSKSQVFLKMNSLQTDDTAIYYCAKH
YYYGGSYAMDYWGQGTSVTVSSTTTPAPRPPTPAPTIASQPLSLRPEACRPAAGGAVHTR
GLDFACDIYIWAPLAGTCGVLLLSLVITLYCKRGRKKLLYIFKQPFMRPVQTTQEEDGCSC
RFPEEEEGGCELRVKFSRSADAPAYKQGQNQLYNELNLGRREEYDVLDKRRGRDPEMG
GKPRRKNPQEGLYNELQKDKMAEAYSEIGMKGERRRGKGHDGLYQGLSTATKDTYDAL
HMQALPPRGSGATNFSLLKQAGDVEENPGPMALPVTALLLPLALLLHAARPSLFNQEVQI
PLTESYCGPCPKNWICYKNNCYQFFDESKNWYESQASCMSQNASLLKVYSKEDQDLLK
LVKSYHWMGLVHIPTNGSWQWEDGSILSPNLLTIIEMQKGDCALYASSFKGYIENCSTPN
TYICMQRTVSDPTRVETATETAWISLVTALHLVLGLSAVLGLLLLRWQFPAHYRRLRHAL
WPSLPDLHRVLGQYLRDTAALSPPKATVSDTCEEVEPSLLEILPKSSERTPLPLARDEVEG
FLQDTFPQQLEESEKQRLGGDVQSPNCPSEDVVITPESFGRDSSLTCLAGNVSACDAPILS
SSRSLDCRESGKNGPHVYQDLLLSLGTTNSTLPPPFSLQSGILTLNPVAQGQPILTSLGSNQ
EEAYVTMSSFYQNQSDPKPENPACPWTVLPAGDLPTHDGYLPSNIDDLPSHEAPLADSLE
ELEPQ
SEQ ID NO: 143 (AS67190 amino acid sequence)
MALPVTALLLPLALLLHAARPQVQLVESGGGLVQAGGSLRLSCAASGNVFRFNIMGWY
RQAPGNQRELVASIDDGGDRSYADSVEGRFTISRENGKKIMYLQMNSLKPEDTAVYYCA
AGLGTYLNGRVSMATNYWGQGTQVTVSSTTTPAPRPPTPAPTIASQPLSLRPEACRPAAG
GAVHTRGLDFACDIYIWAPLAGTCGVLLLSLVITLYCKRGRKKLLYIFKQPFMRPVQTTQE
EDGCSCRFPEEEEGGCELRVKFSRSADAPAYKQGQNQLYNELNLGRREEYDVLDKRRGR
DPEMGGKPRRKNPQEGLYNELQKDKMAEAYSEIGMKGERRRGKGHDGLYQGLSTATKD
TYDALHMQALPPR
SEQ ID NO: 144 (AS67190 NKG2D-IL-7Rα-IL-12Rβ2 amino acid sequence)
MALPVTALLLPLALLLHAARPQVQLVESGGGLVQAGGSLRLSCAASGNVFRFNIMGWY
RQAPGNQRELVASIDDGGDRSYADSVEGRFTISRENGKKIMYLQMNSLKPEDTAVYYCA
AGLGTYLNGRVSMATNYWGQGTQVTVSSTTTPAPRPPTPAPTIASQPLSLRPEACRPAAG
GAVHTRGLDFACDIYIWAPLAGTCGVLLLSLVITLYCKRGRKKLLYIFKQPFMRPVQTTQE
EDGCSCRFPEEEEGGCELRVKFSRSADAPAYKQGQNQLYNELNLGRREEYDVLDKRRGR
DPEMGGKPRRKNPQEGLYNELQKDKMAEAYSEIGMKGERRRGKGHDGLYQGLSTATKD
TYDALHMQALPPRGSGATNFSLLKQAGDVEENPGPMALPVTALLLPLALLLHAARPSLF
NQEVQIPLTESYCGPCPKNWICYKNNCYQFFDESKNWYESQASCMSQNASLLKVYSKED
QDLLKLVKSYHWMGLVHIPTNGSWQWEDGSILSPNLLTIIEMQKGDCALYASSFKGYIEN
CSTPNTYICMQRTVSDPTRVETATETAWISLVTALHLVLGLSAVLGLLLLRWQFPAHYRRL
RHALWPSLPDLHRVLGQYLRDTAALSPPKATVSDTCEEVEPSLLEILPKSSERTPLPLARD
EVEGFLQDTFPQQLEESEKQRLGGDVQSPNCPSEDVVITPESFGRDSSLTCLAGNVSACD
APILSSSRSLDCRESGKNGPHVYQDLLLSLGTTNSTLPPPFSLQSGILTLNPVAQGQPILTSL
GSNQEEAYVTMSSFYQNQSDPKPENPACPWTVLPAGDLPTHDGYLPSNIDDLPSHEAPLA
DSLEELEPQ
SEQ ID NO: 145 (TIGIT extracellular domain amino acid sequence)
MRWCLLLIWAQGLRQAPLASGMMTGTIETTGNISAEKGGSIILQCHLSSTTAQVTQVNW
EQQDQLLAICNADLGWHISPSFKDRVAPGPGLGLTLQSLTVNDTGEYFCIYHTYPDGTYT
GRIFLEVLESSVAEHGARFQIP
SEQ ID NO: 146 (BM TIGIT-IL-7Rα-IL-12Rβ2 amino acid sequence)
MALPVTALLLPLALLLHAARPDVVMTQSPLSLPVTPGEPASISCRSSQSLVHSNANTYLH
WYLQKPGQSPQLLIYKVSNRFSGVPDRFSGSGSGTDFTLKISRVEAEDVGVYYCSQNTH
VPPTFGQGTKLEIKRGGGGSGGGGSGGGGSQVQLVQSGAEVKKPGASVKVSCKASGYT
FTDYEMHWVRQAPGQGLEWMGALDPKTGDTAYSQKFKGRVTLTADESTSTAYMELSSL
RSEDTAVYYCTRFYSYTYWGQGTLVTVSSTTTPAPRPPTPAPTIASQPLSLRPEACRPAAG
GAVHTRGLDFACDIYIWAPLAGTCGVLLLSLVITLYCKRGRKKLLYIFKQPFMRPVQTTQE
EDGCSCRFPEEEEGGCELRVKFSRSADAPAYKQGQNQLYNELNLGRREEYDVLDKRRGR
DPEMGGKPRRKNPQEGLYNELQKDKMAEAYSEIGMKGERRRGKGHDGLYQGLSTATKD
TYDALHMQALPPRGSGATNFSLLKQAGDVEENPGPMRWCLLLIWAQGLRQAPLASGM
MTGTIETTGNISAEKGGSIILQCHLSSTTAQVTQVNWEQQDQLLAICNADLGWHISPSFK
DRVAPGPGLGLTLQSLTVNDTGEYFCIYHTYPDGTYTGRIFLEVLESSVAEHGARFQIPSDP
TRVETATETAWISLVTALHLVLGLSAVLGLLLLRWQFPAHYRRLRHALWPSLPDLHRVLG
QYLRDTAALSPPKATVSDTCEEVEPSLLEILPKSSERTPLPLARDEVEGFLQDTFPQQLEES
EKQRLGGDVQSPNCPSEDVVITPESFGRDSSLTCLAGNVSACDAPILSSSRSLDCRESGKN
GPHVYQDLLLSLGTTNSTLPPPFSLQSGILTLNPVAQGQPILTSLGSNQEEAYVTMSSFYQN
QSDPKPENPACPWTVLPAGDLPTHDGYLPSNIDDLPSHEAPLADSLEELEPQ
SEQ ID NO: 147 (SIRP-α extracellular domain amino acid sequence)
MEPAGPAPGRLGPLLCLLLAASCAWSGVAGEEELQVIQPDKSVLVAAGETATLRCTATSLI
PVGPIQWFRGAGPGRELIYNQKEGHFPRVTTVSDLTKRNNMDFSIRIGNITPADAGTYYC
VKFRKGSPDDVEFKSGAGTELSVRAKPSAPVVSGPAARATPQHTVSFTCESHGFSPRDITL
KWFKNGNELSDFQTNVDPVGESVSYSIHSTAKVVLTREDVHSQVICEVAHVTLQGDPLR
GTANLSETIRVPPTLEVTQQPVRAENQVNVTCQVRKFYPQRLQLTWLENGNVSRTETAST
VTENKDGTYNWMSWLLVNVSAHRDDVKLTCQVEHDGQPAVSKSHDLKVSAHPKEQGS
NTAAENTGSNERNIY
SEQ ID NO: 148 (AS67190 SIRP-α-IL-7Rα-IL-12Rβ2 amino acid sequence)
MALPVTALLLPLALLLHAARPQVQLVESGGGLVQAGGSLRLSCAASGNVFRFNIMGWY
RQAPGNQRELVASIDDGGDRSYADSVEGRFTISRENGKKIMYLQMNSLKPEDTAVYYCA
AGLGTYLNGRVSMATNYWGQGTQVTVSSTTTPAPRPPTPAPTIASQPLSLRPEACRPAAG
GAVHTRGLDFACDIYIWAPLAGTCGVLLLSLVITLYCKRGRKKLLYIFKQPFMRPVQTTQE
EDGCSCRFPEEEEGGCELRVKFSRSADAPAYKQGQNQLYNELNLGRREEYDVLDKRRGR
DPEMGGKPRRKNPQEGLYNELQKDKMAEAYSEIGMKGERRRGKGHDGLYQGLSTATKD
TYDALHMQALPPRGSGATNFSLLKQAGDVEENPGPMEPAGPAPGRLGPLLCLLLAASCA
WSGVAGEEELQVIQPDKSVLVAAGETATLRCTATSLIPVGPIQWFRGAGPGRELIYNQKEG
HFPRVTTVSDLTKRNNMDFSIRIGNITPADAGTYYCVKFRKGSPDDVEFKSGAGTELSVR
AKPSAPVVSGPAARATPQHTVSFTCESHGFSPRDITLKWFKNGNELSDFQTNVDPVGESV
SYSIHSTAKVVLTREDVHSQVICEVAHVTLQGDPLRGTANLSETIRVPPTLEVTQQPVRAE
NQVNVTCQVRKFYPQRLQLTWLENGNVSRTETASTVTENKDGTYNWMSWLLVNVSAH
RDDVKLTCQVEHDGQPAVSKSHDLKVSAHPKEQGSNTAAENTGSNERNIYSDPTRVETA
TETAWISLVTALHLVLGLSAVLGLLLLRWQFPAHYRRLRHALWPSLPDLHRVLGQYLRDT
AALSPPKATVSDTCEEVEPSLLEILPKSSERTPLPLARDEVEGFLQDTFPQQLEESEKQRLG
GDVQSPNCPSEDVVITPESFGRDSSLTCLAGNVSACDAPILSSSRSLDCRESGKNGPHVYQ
DLLLSLGTTNSTLPPPFSLQSGILTLNPVAQGQPILTSLGSNQEEAYVTMSSFYQNQSDPKP
ENPACPWTVLPAGDLPTHDGYLPSNIDDLPSHEAPLADSLEELEPQ
SEQ ID NO: 149 (NKG2D CAR amino acid sequence)
MALPVTALLLPLALLLHAARPSLFNQEVQIPLTESYCGPCPKNWICYKNNCYQFFDESKN
WYESQASCMSQNASLLKVYSKEDQDLLKLVKSYHWMGLVHIPTNGSWQWEDGSILSPN
LLTIIEMQKGDCALYASSFKGYIENCSTPNTYICMQRTVTTTPAPRPPTPAPTIASQPLSLRP
EACRPAAGGAVHTRGLDFACDIYIWAPLAGTCGVLLLSLVITLYCKRGRKKLLYIFKQPF
MRPVQTTQEEDGCSCRFPEEEEGGCELRVKFSRSADAPAYKQGQNQLYNELNLGRREEY
DVLDKRRGRDPEMGGKPRRKNPQEGLYNELQKDKMAEAYSEIGMKGERRRGKGHDGL
YQGLSTATKDTYDALHMQALPPR
SEQ ID NO: 150 (BM NKG2D (Deleted) IL15Rβ-1-IL-21R-1 amino acid sequence)
MALPVTALLLPLALLLHAARPDVVMTQSPLSLPVTPGEPASISCRSSQSLVHSNANTYLH
WYLQKPGQSPQLLIYKVSNRFSGVPDRFSGSGSGTDFTLKISRVEAEDVGVYYCSQNTH
VPPTFGQGTKLEIKRGGGGSGGGGSGGGGSQVQLVQSGAEVKKPGASVKVSCKASGYT
FTDYEMHWVRQAPGQGLEWMGALDPKTGDTAYSQKFKGRVTLTADESTSTAYMELSSL
RSEDTAVYYCTRFYSYTYWGQGTLVTVSSTTTPAPRPPTPAPTIASQPLSLRPEACRPAAG
GAVHTRGLDFACDIYIWAPLAGTCGVLLLSLVITLYCKRGRKKLLYIFKQPFMRPVQTTQE
EDGCSCRFPEEEEGGCELRVKFSRSADAPAYKQGQNQLYNELNLGRREEYDVLDKRRGR
DPEMGGKPRRKNPQEGLYNELQKDKMAEAYSEIGMKGERRRGKGHDGLYQGLSTATKD
TYDALHMQALPPRGSGATNFSLLKQAGDVEENPGPMALPVTALLLPLALLLHAARPSDP
TRVETATETAWISLVTALHLVLGLSAVLGLLLLRWQFPAHYRRLRHALWPSLPDLHRVLG
QYLRDTAALSPPKATVSDTCEEVEPSLLEILPKSSERTPLPLVTQLLLQQDKVPEPASLSSN
HSLTSCFTNQGYFFFHLPDALEIEACQVYFTYDPYSEEDPDEGVAGAPTGSSPQPLQPLSG
EDDAYCTFPSRDDLLLFSPSLLGGPSPPSTAPGGSGAGEERMPPSLQERVPRDWDPQPLGP
PTPGVPDLVDFQPPPELVLREAGEEVPDAGPREGVSFPWSRPPGQGEFRALNARLPLNTD
AYLSLQELQGQDPTHLVLELGPWSPEVPSTLEVYSCHPPRSPAKRLQLTELQEPAELVESD
GVPKPSFWPTAQNSGGSAYSEERDRPYGLVSIDTVTVLDAEGPCTWPCSCEDDGYPALDL
DAGLEPS
SEQ ID NO: 151 (BM TPOR (S505N, W515K) IL15Rβ-1-IL-21R-1 amino acid sequence)
MALPVTALLLPLALLLHAARPDVVMTQSPLSLPVTPGEPASISCRSSQSL VHSNANTYLH
WYLQKPGQSPQLLIYKVSNRFSGVPDRFSGSGSGTDFTLKISRVEAEDVGVYYCSQNTH
VPPTFGQGTKLEIKRGGGGSGGGGSGGGGSQVQLVQSGAEVKKPGASVKVSCKASGYT
FTDYEMHWVRQAPGQGLEWMGALDPKTGDTAYSQKFKGRVTLTADESTSTAYMELSS
LRSEDTAVYYCTRFYSYTYWGQGTLVTVSSTTTPAPRPPTPAPTIASQPLSLRPEACRPAA
GGAVHTRGLDFACDIYIWAPLAGTCGVLLLSLVITLYCKRGRKKLLYIFKQPFMRPVQTT
QEEDGCSCRFPEEEEGGCELRVKFSRSADAPAYKQGQNQLYNELNLGRREEYDVLDKR
RGRDPEMGGKPRRKNPQEGLYNELQKDKMAEAYSEIGMKGERRRGKGHDGLYQGLST
ATKDTYDALHMQALPPRGSGATNFSLLKQAGDVEENPGPMALPVTALLLPLALLLHAA
RPSDPTRVETATETAWISLVTALHLVLGLNAVLGLLLLRKQFPAHYRRLRHALWPSLPD
LHRVLGQYLRDTAALSPPKATVSDTCEEVEPSLLEILPKSSERTPLPLVTQLLLQQDKVPE
PASLSSNHSLTSCFTNQGYFFFHLPDALEIEACQVYFTYDPYSEEDPDEGVAGAPTGSSPQ
PLQPLSGEDDAYCTFPSRDDLLLFSPSLLGGPSPPSTAPGGSGAGEERMPPSLQERVPRD
WDPQPLGPPTPGVPDLVDFQPPPELVLREAGEEVPDAGPREGVSFPWSRPPGQGEFRALN
ARLPLNTDAYLSLQELQGQDPTHLVLELGPWSPEVPSTLEVYSCHPPRSPAKRLQLTELQ
EPAELVESDGVPKPSFWPTAQNSGGSAYSEERDRPYGLVSIDTVTVLDAEGPCTWPCSCE
DDGYPALDLDAGLEPS
SEQ ID NO: 152 (Exemplary linker, n is an integer of at least one)
(GS)n
SEQ ID NO: 153 (Exemplary linker, n is an integer of at least one)
(GSGGS)n
SEQ ID NO: 154 (Exemplary linker, n is an integer of at least one)
(GGGS)n
SEQ ID NO: 155 (Exemplary linker, n is an integer of at least one)
(GGGGS)n
SEQ ID NO: 156 (truncated NKG2D (98-216))
PCPKNWICYKNNCYQFFDESKNWYESQASCMSQNASLLKVYSKEDQDLLKLVKSYHW
MGLVHIPTNGSWQWEDGSILSPNLLTIIEMQKGDCALYASSFKGYIENCSTPNTYICMQR
TV
SEQ ID NO: 157 (truncated NKG2D (89-216))
IPLTESYCGPCPKNWICYKNNCYQFFDESKNWYESQASCMSQNASLLKVYSKEDQDLLK
LVKSYHWMGLVHIPTNGSWQWEDGSILSPNLLTIIEMQKGDCALYASSFKGYIENCSTP
NTYICMQRTV
SEQ ID NO: 158 (C-MYC tag)
DEQKLISEEDL
SEQ ID NO: 159 (C-MYC-C-MYC tag)
DEQKLISEEDLEQKLISEEDL
SEQ ID NO: 160 (SBP tag)
DYMDEKTTGWRGGHVVEGLAGELEQLRARLEHHPQGQREP

The application's sequence listing, which the Patent Office published only in electronic form, follows.

SEQUENCE LISTING (160 sequences)

SEQ ID NO: 1 - protein, 21 aa, Artificial Sequence
  CD8alpha signal peptide amino acid sequence
MALPVTALLLPLALLLHAARP

SEQ ID NO: 2 - protein, 17 aa, Artificial Sequence
  GM-CSF signal peptide amino acid sequence
MWLQSLLLLGTVACSIS

SEQ ID NO: 3 - protein, 29 aa, Artificial Sequence
  IL-15 signal peptide amino acid sequence
MRISKPHLRSISIQCYLCLLLNSHFLTEA

SEQ ID NO: 4 - protein, 8 aa, Artificial Sequence
  FLAG tag amino acid sequence
DYKDDDDK

SEQ ID NO: 5 - protein, 9 aa, Artificial Sequence
  HA tag amino acid sequence
YPYDVPDYA

SEQ ID NO: 6 - protein, 136 aa, Artificial Sequence
  NKG2D 81-216 amino acid sequence
SLFNQEVQIPLTESYCGPCPKNWICYKNNCYQFFDESKNWYESQASCMSQNASLLKVYSKEDQDLLKLVKSYHWMGLVHIPTNGSWQWEDGSILSPNLLTIIEMQKGDCALYASSFKGYIENCSTPNTYICMQRTV

SEQ ID NO: 7 - protein, 105 aa, Artificial Sequence
  TpoR 478-582 amino acid sequence
SDPTRVETATETAWISLVTALHLVLGLSAVLGLLLLRWQFPAHYRRLRHALWPSLPDLHRVLGQYLRDTAALSPPKATVSDTCEEVEPSLLEILPKSSERTPLPL

SEQ ID NO: 8 - protein, 144 aa, Artificial Sequence
  IL7Ralpha 316-459 amino acid sequence
ARDEVEGFLQDTFPQQLEESEKQRLGGDVQSPNCPSEDVVITPESFGRDSSLTCLAGNVSACDAPILSSSRSLDCRESGKNGPHVYQDLLLSLGTTNSTLPPPFSLQSGILTLNPVAQGQPILTSLGSNQEEAYVTMSSFYQNQ

SEQ ID NO: 9 - protein, 155 aa, Artificial Sequence
  IL9R-1 310-464 amino acid sequence
MFFQPLYSVHNGNFQTWMGAHGAGVLLSQDCAGTPQGALEPCVQEATALLTCGPARPWKSVALEEEQEGPGTRLPGNLSSEDVLPAGCTEWRVQTLAYLPQEDWAPTSLTRPAPPDSEGSRSSSSSSSSNNNNYCALGCYGGWHLSALPGNTQSS

SEQ ID NO: 10 - protein, 74 aa, Artificial Sequence
  IL9R-2 391-464 amino acid sequence
DVLPAGCTEWRVQTLAYLPQEDWAPTSLTRPAPPDSEGSRSSSSSSSSNNNNYCALGCYGGWHLSALPGNTQSS

SEQ ID NO: 11 - protein, 102 aa, Artificial Sequence
  IL9R-3 310-337, 391-464 amino acid sequence
MFFQPLYSVHNGNFQTWMGAHGAGVLLSDVLPAGCTEWRVQTLAYLPQEDWAPTSLTRPAPPDSEGSRSSSSSSSSNNNNYCALGCYGGWHLSALPGNTQSS

SEQ ID NO: 12 - protein, 51 aa, Artificial Sequence
  IL12Rbeta1 612-662 amino acid sequence
SLQEALVVEMSWDKGERTEPLEKTELPEGAPELALDTELSLEDGDRCKAKM

SEQ ID NO: 13 - protein, 51 aa, Artificial Sequence
  IL12Rbeta2 775-825 amino acid sequence
SDPKPENPACPWTVLPAGDLPTHDGYLPSNIDDLPSHEAPLADSLEELEPQ

SEQ ID NO: 14 - protein, 39 aa, Artificial Sequence
  IL15Ralpha 229-267 amino acid sequence
KSRQTPPLASVEMEAMEALPVTWGTSSRDEDLENCSHHL

SEQ ID NO: 15 - protein, 219 aa, Artificial Sequence
  IL15Rbeta-1 333-551 amino acid sequence
VTQLLLQQDKVPEPASLSSNHSLTSCFTNQGYFFFHLPDALEIEACQVYFTYDPYSEEDPDEGVAGAPTGSSPQPLQPLSGEDDAYCTFPSRDDLLLFSPSLLGGPSPPSTAPGGSGAGEERMPPSLQERVPRDWDPQPLGPPTPGVPDLVDFQPPPELVLREAGEEVPDAGPREGVSFPWSRPPGQGEFRALNARLPLNTDAYLSLQELQGQDPTHLV

SEQ ID NO: 16 - protein, 118 aa, Artificial Sequence
  IL15Rbeta-2 345-431, 521-551 amino acid sequence
EPASLSSNHSLTSCFTNQGYFFFHLPDALEIEACQVYFTYDPYSEEDPDEGVAGAPTGSSPQPLQPLSGEDDAYCTFPSRDDLLLFSEFRALNARLPLNTDAYLSLQELQGQDPTHLV

SEQ ID NO: 17 - protein, 62 aa, Artificial Sequence
  IL15Rbeta-3 401-431, 521-551 amino acid sequence
TGSSPQPLQPLSGEDDAYCTFPSRDDLLLFSEFRALNARLPLNTDAYLSLQELQGQDPTHLV

SEQ ID NO: 18 - protein, 170 aa, Artificial Sequence
  IL-18Ralpha 361-530 amino acid sequence
HLTRRDETLTDGKTYDAFVSYLKECRPENGEEHTFAVEILPRVLEKHFGYKLCIFERDVVPGGAVVDEIHSLIEKSRRLIIVLSKSYMSNEVRYELESGLHEALVERKIKIILIEFTPVTDFTFLPQSLKLLKSHRVLKWKADKSLSYNSRFWKNLLYLMPAKTVKPGRD

SEQ ID NO: 19 - protein, 190 aa, Artificial Sequence
  IL-18Rbeta 391-570 amino acid sequence
LYRHWIEIVLLYRTYQSKDQTLGDKKDFDAFVSYAKWSSFPSEATSSLSEEHLALSLFPDVLENKYGYSLCLLERDVAPGGVYAEDIVSIIKRSRRGIFILSPNYVNGPSIFELQAAVNLALDDQTLKLILIKFCYFQEPESLPHLVKKALRVLPTVTWRGLKSVPPNSRFWAKMRYHMPVKNSQGFTWN

SEQ ID NO: 20 - protein, 111 aa, Artificial Sequence
  IL-21R-1 301-411 amino acid sequence
LELGPWSPEVPSTLEVYSCHPPRSPAKRLQLTELQEPAELVESDGVPKPSFWPTAQNSGGSAYSEERDRPYGLVSIDTVTVLDAEGPCTWPCSCEDDGYPALDLDAGLEPS

SEQ ID NO: 21 - protein, 35 aa, Artificial Sequence
  IL-21R-2 504-538 amino acid sequence
ECDFTSPGDEGPPRSYLRQWVVIPPPLSSPGPQAS

SEQ ID NO: 22 - protein, 146 aa, Artificial Sequence
  IL-21R-3 301-411, 504-538 amino acid sequence
LELGPWSPEVPSTLEVYSCHPPRSPAKRLQLTELQEPAELVESDGVPKPSFWPTAQNSGGSAYSEERDRPYGLVSIDTVTVLDAEGPCTWPCSCEDDGYPALDLDAGLEPSECDFTSPGDEGPPRSYLRQWVVIPPPLSSPGPQAS

SEQ ID NO: 23 - protein, 120 aa, Artificial Sequence
  IL-23R-1 381-500 amino acid sequence
RTGIKRRILLLIPKWLYEDIPNMKNSNVVKMLQENSELMNNNSSEQVLYVDPMITEIKEIFIPEHKPTDYKKENTGPLETRDYPQNSLFDNTTVVYIPDLNTGYKPQISNFLPEGSHLSN

SEQ ID NO: 24 - protein, 33 aa, Artificial Sequence
  IL-23R-2 593-625 amino acid sequence
EFVSCLGIVNEELPSINTYFPQNILESHFNRIS

SEQ ID NO: 25 - protein, 153 aa, Artificial Sequence
  IL-23R-3 381-500, 593-625 amino acid sequence
RTGIKRRILLLIPKWLYEDIPNMKNSNVVKMLQENSELMNNNSSEQVLYVDPMITEIKEIFIPEHKPTDYKKENTGPLETRDYPQNSLFDNTTVVYIPDLNTGYKPQISNFLPEGSHLSNEFVSCLGIVNEELPSINTYFPQNILESHFNRIS

SEQ ID NO: 26 - protein, 30 aa, Artificial Sequence
  GM-CSFRalpha 371-400 amino acid sequence
EVEDEIIWEEFTPEEGKGYREEVLTVKEIT

SEQ ID NO: 27 - protein, 119 aa, Artificial Sequence
  GM-CSFRbeta-1 701-729, 751-779, 809-838, 867-897 amino acid sequence
DTEDPGVASGYVSSADLVFTPNSGASSVSGPPGAPGPVKSGFEGYVELPPIEGRSPRSQPEGLLVLQQVGDYCFLPGLGPGPLSLRSKQVPVIQLFKALKQQDYLSLPPWEVNKPGEVC

SEQ ID NO: 28 - protein, 183 aa, Artificial Sequence
  GM-CSFRbeta-2 581-644, 701-729, 751-779, 809-838, 867-897 amino acid sequence
EKQASSFDFNGPYLGPPHSRSLPDILGQPEPPQEGGSQKSPPPGSLEYLCLPAGGQVQLVPLAQDTEDPGVASGYVSSADLVFTPNSGASSVSGPPGAPGPVKSGFEGYVELPPIEGRSPRSQPEGLLVLQQVGDYCFLPGLGPGPLSLRSKQVPVIQLFKALKQQDYLSLPPWEVNKPGEVC

SEQ ID NO: 29 - protein, 487 aa, Artificial Sequence
  BM CAR amino acid sequence
MALPVTALLLPLALLLHAARPDVVMTQSPLSLPVTPGEPASISCRSSQSLVHSNANTYLHWYLQKPGQSPQLLIYKVSNRFSGVPDRFSGSGSGTDFTLKISRVEAEDVGVYYCSQNTHVPPTFGQGTKLEIKRGGGGSGGGGSGGGGSQVQLVQSGAEVKKPGASVKVSCKASGYTFTDYEMHWVRQAPGQGLEWMGALDPKTGDTAYSQKFKGRVTLTADESTSTAYMELSSLRSEDTAVYYCTRFYSYTYWGQGTLVTVSSTTTPAPRPPTPAPTIASQPLSLRPEACRPAAGGAVHTRGLDFACDIYIWAPLAGTCGVLLLSLVITLYCKRGRKKLLYIFKQPFMRPVQTTQEEDGCSCRFPEEEEGGCELRVKFSRSADAPAYKQGQNQLYNELNLGRREEYDVLDKRRGRDPEMGGKPRRKNPQEGLYNELQKDKMAEAYSEIGMKGERRRGKGHDGLYQGLSTATKDTYDALHMQALPPR

SEQ ID NO: 30 - protein, 966 aa, Artificial Sequence
  BM NKG2D-IL7Ralpha-IL12Rbeta2 amino acid sequence
MALPVTALLLPLALLLHAARPDVVMTQSPLSLPVTPGEPASISCRSSQSLVHSNANTYLHWYLQKPGQSPQLLIYKVSNRFSGVPDRFSGSGSGTDFTLKISRVEAEDVGVYYCSQNTHVPPTFGQGTKLEIKRGGGGSGGGGSGGGGSQVQLVQSGAEVKKPGASVKVSCKASGYTFTDYEMHWVRQAPGQGLEWMGALDPKTGDTAYSQKFKGRVTLTADESTSTAYMELSSLRSEDTAVYYCTRFYSYTYWGQGTLVTVSSTTTPAPRPPTPAPTIASQPLSLRPEACRPAAGGAVHTRGLDFACDIYIWAPLAGTCGVLLLSLVITLYCKRGRKKLLYIFKQPFMRPVQTTQEEDGCSCRFPEEEEGGCELRVKFSRSADAPAYKQGQNQLYNELNLGRREEYDVLDKRRGRDPEMGGKPRRKNPQEGLYNELQKDKMAEAYSEIGMKGERRRGKGHDGLYQGLSTATKDTYDALHMQALPPRGSGATNFSLLKQAGDVEENPGPMALPVTALLLPLALLLHAARPSLFNQEVQIPLTESYCGPCPKNWICYKNNCYQFFDESKNWYESQASCMSQNASLLKVYSKEDQDLLKLVKSYHWMGLVHIPTNGSWQWEDGSILSPNLLTIIEMQKGDCALYASSFKGYIENCSTPNTYICMQRTVSDPTRVETATETAWISLVTALHLVLGLSAVLGLLLLRWQFPAHYRRLRHALWPSLPDLHRVLGQYLRDTAALSPPKATVSDTCEEVEPSLLEILPKSSERTPLPLARDEVEGFLQDTFPQQLEESEKQRLGGDVQSPNCPSEDVVITPESFGRDSSLTCLAGNVSACDAPILSSSRSLDCRESGKNGPHVYQDLLLSLGTTNSTLPPPFSLQSGILTLNPVAQGQPILTSLGSNQEEAYVTMSSFYQNQSDPKPENPACPWTVLPAGDLPTHDGYLPSNIDDLPSHEAPLADSLEELEPQ

SEQ ID NO: 31 - protein, 915 aa, Artificial Sequence
  BM NKG2D-IL-7Ralpha amino acid sequence
MALPVTALLLPLALLLHAARPDVVMTQSPLSLPVTPGEPASISCRSSQSLVHSNANTYLHWYLQKPGQSPQLLIYKVSNRFSGVPDRFSGSGSGTDFTLKISRVEAEDVGVYYCSQNTHVPPTFGQGTKLEIKRGGGGSGGGGSGGGGSQVQLVQSGAEVKKPGASVKVSCKASGYTFTDYEMHWVRQAPGQGLEWMGALDPKTGDTAYSQKFKGRVTLTADESTSTAYMELSSLRSEDTAVYYCTRFYSYTYWGQGTLVTVSSTTTPAPRPPTPAPTIASQPLSLRPEACRPAAGGAVHTRGLDFACDIYIWAPLAGTCGVLLLSLVITLYCKRGRKKLLYIFKQPFMRPVQTTQEEDGCSCRFPEEEEGGCELRVKFSRSADAPAYKQGQNQLYNELNLGRREEYDVLDKRRGRDPEMGGKPRRKNPQEGLYNELQKDKMAEAYSEIGMKGERRRGKGHDGLYQGLSTATKDTYDALHMQALPPRGSGATNFSLLKQAGDVEENPGPMALPVTALLLPLALLLHAARPSLFNQEVQIPLTESYCGPCPKNWICYKNNCYQFFDESKNWYESQASCMSQNASLLKVYSKEDQDLLKLVKSYHWMGLVHIPTNGSWQWEDGSILSPNLLTIIEMQKGDCALYASSFKGYIENCSTPNTYICMQRTVSDPTRVETATETAWISLVTALHLVLGLSAVLGLLLLRWQFPAHYRRLRHALWPSLPDLHRVLGQYLRDTAALSPPKATVSDTCEEVEPSLLEILPKSSERTPLPLARDEVEGFLQDTFPQQLEESEKQRLGGDVQSPNCPSEDVVITPESFGRDSSLTCLAGNVSACDAPILSSSRSLDCRESGKNGPHVYQDLLLSLGTTNSTLPPPFSLQSGILTLNPVAQGQPILTSLGSNQEEAYVTMSSFYQNQ

SEQ ID NO: 32 - protein, 822 aa, Artificial Sequence
  BM NKG2D-IL12Rbeta1 amino acid sequence
MALPVTALLLPLALLLHAARPDVVMTQSPLSLPVTPGEPASISCRSSQSLVHSNANTYLHWYLQKPGQSPQLLIYKVSNRFSGVPDRFSGSGSGTDFTLKISRVEAEDVGVYYCSQNTHVPPTFGQGTKLEIKRGGGGSGGGGSGGGGSQVQLVQSGAEVKKPGASVKVSCKASGYTFTDYEMHWVRQAPGQGLEWMGALDPKTGDTAYSQKFKGRVTLTADESTSTAYMELSSLRSEDTAVYYCTRFYSYTYWGQGTLVTVSSTTTPAPRPPTPAPTIASQPLSLRPEACRPAAGGAVHTRGLDFACDIYIWAPLAGTCGVLLLSLVITLYCKRGRKKLLYIFKQPFMRPVQTTQEEDGCSCRFPEEEEGGCELRVKFSRSADAPAYKQGQNQLYNELNLGRREEYDVLDKRRGRDPEMGGKPRRKNPQEGLYNELQKDKMAEAYSEIGMKGERRRGKGHDGLYQGLSTATKDTYDALHMQALPPRGSGATNFSLLKQAGDVEENPGPMALPVTALLLPLALLLHAARPSLFNQEVQIPLTESYCGPCPKNWICYKNNCYQFFDESKNWYESQASCMSQNASLLKVYSKEDQDLLKLVKSYHWMGLVHIPTNGSWQWEDGSILSPNLLTIIEMQKGDCALYASSFKGYIENCSTPNTYICMQRTVSDPTRVETATETAWISLVTALHLVLGLSAVLGLLLLRWQFPAHYRRLRHALWPSLPDLHRVLGQYLRDTAALSPPKATVSDTCEEVEPSLLEILPKSSERTPLPLSLQEALVVEMSWDKGERTEPLEKTELPEGAPELALDTELSLEDGDRCKAKM

SEQ ID NO: 33 - protein, 822 aa, Artificial Sequence
  BM NKG2D-IL-12Rbeta2 amino acid sequence
MALPVTALLLPLALLLHAARPDVVMTQSPLSLPVTPGEPASISCRSSQSLVHSNANTYLHWYLQKPGQSPQLLIYKVSNRFSGVPDRFSGSGSGTDFTLKISRVEAEDVGVYYCSQNTHVPPTFGQGTKLEIKRGGGGSGGGGSGGGGSQVQLVQSGAEVKKPGASVKVSCKASGYTFTDYEMHWVRQAPGQGLEWMGALDPKTGDTAYSQKFKGRVTLTADESTSTAYMELSSLRSEDTAVYYCTRFYSYTYWGQGTLVTVSSTTTPAPRPPTPAPTIASQPLSLRPEACRPAAGGAVHTRGLDFACDIYIWAPLAGTCGVLLLSLVITLYCKRGRKKLLYIFKQPFMRPVQTTQEEDGCSCRFPEEEEGGCELRVKFSRSADAPAYKQGQNQLYNELNLGRREEYDVLDKRRGRDPEMGGKPRRKNPQEGLYNELQKDKMAEAYSEIGMKGERRRGKGHDGLYQGLSTATKDTYDALHMQALPPRGSGATNFSLLKQAGDVEENPGPMALPVTALLLPLALLLHAARPSLFNQEVQIPLTESYCGPCPKNWICYKNNCYQFFDESKNWYESQASCMSQNASLLKVYSKEDQDLLKLVKSYHWMGLVHIPTNGSWQWEDGSILSPNLLTIIEMQKGDCALYASSFKGYIENCSTPNTYICMQRTVSDPTRVETATETAWISLVTALHLVLGLSAVLGLLLLRWQFPAHYRRLRHALWPSLPDLHRVLGQYLRDTAALSPPKATVSDTCEEVEPSLLEILPKSSERTPLPLSDPKPENPACPWTVLPAGDLPTHDGYLPSNIDDLPSHEAPLADSLEELEPQ

SEQ ID NO: 34 - protein, 810 aa, Artificial Sequence
  BM NKG2D-IL15Ralpha amino acid sequence
MALPVTALLLPLALLLHAARPDVVMTQSPLSLPVTPGEPASISCRSSQSLVHSNANTYLHWYLQKPGQSPQLLIYKVSNRFSGVPDRFSGSGSGTDFTLKISRVEAEDVGVYYCSQNTHVPPTFGQGTKLEIKRGGGGSGGGGSGGGGSQVQLVQSGAEVKKPGASVKVSCKASGYTFTDYEMHWVRQAPGQGLEWMGALDPKTGDTAYSQKFKGRVTLTADESTSTAYMELSSLRSEDTAVYYCTRFYSYTYWGQGTLVTVSSTTTPAPRPPTPAPTIASQPLSLRPEACRPAAGGAVHTRGLDFACDIYIWAPLAGTCGVLLLSLVITLYCKRGRKKLLYIFKQPFMRPVQTTQEEDGCSCRFPEEEEGGCELRVKFSRSADAPAYKQGQNQLYNELNLGRREEYDVLDKRRGRDPEMGGKPRRKNPQEGLYNELQKDKMAEAYSEIGMKGERRRGKGHDGLYQGLSTATKDTYDALHMQALPPRGSGATNFSLLKQAGDVEENPGPMALPVTALLLPLALLLHAARPSLFNQEVQIPLTESYCGPCPKNWICYKNNCYQFFDESKNWYESQASCMSQNASLLKVYSKEDQDLLKLVKSYHWMGLVHIPTNGSWQWEDGSILSPNLLTIIEMQKGDCALYASSFKGYIENCSTPNTYICMQRTVSDPTRVETATETAWISLVTALHLVLGLSAVLGLLLLRWQFPAHYRRLRHALWPSLPDLHRVLGQYLRDTAALSPPKATVSDTCEEVEPSLLEILPKSSERTPLPLKSRQTPPLASVEMEAMEALPVTWGTSSRDEDLENCSHHL

SEQ ID NO: 35 - protein, 990 aa, Artificial Sequence
  BM NKG2D-IL15Rbeta-1 amino acid sequence
MALPVTALLLPLALLLHAARPDVVMTQSPLSLPVTPGEPASISCRSSQSLVHSNANTYLHWYLQKPGQSPQLLIYKVSNRFSGVPDRFSGSGSGTDFTLKISRVEAEDVGVYYCSQNTHVPPTFGQGTKLEIKRGGGGSGGGGSGGGGSQVQLVQSGAEVKKPGASVKVSCKASGYTFTDYEMHWVRQAPGQGLEWMGALDPKTGDTAYSQKFKGRVTLTADESTSTAYMELSSLRSEDTAVYYCTRFYSYTYWGQGTLVTVSSTTTPAPRPPTPAPTIASQPLSLRPEACRPAAGGAVHTRGLDFACDIYIWAPLAGTCGVLLLSLVITLYCKRGRKKLLYIFKQPFMRPVQTTQEEDGCSCRFPEEEEGGCELRVKFSRSADAPAYKQGQNQLYNELNLGRREEYDVLDKRRGRDPEMGGKPRRKNPQEGLYNELQKDKMAEAYSEIGMKGERRRGKGHDGLYQGLSTATKDTYDALHMQALPPRGSGATNFSLLKQAGDVEENPGPMALPVTALLLPLALLLHAARPSLFNQEVQIPLTESYCGPCPKNWICYKNNCYQFFDESKNWYESQASCMSQNASLLKVYSKEDQDLLKLVKSYHWMGLVHIPTNGSWQWEDGSILSPNLLTIIEMQKGDCALYASSFKGYIENCSTPNTYICMQRTVSDPTRVETATETAWISLVTALHLVLGLSAVLGLLLLRWQFPAHYRRLRHALWPSLPDLHRVLGQYLRDTAALSPPKATVSDTCEEVEPSLLEILPKSSERTPLPLVTQLLLQQDKVPEPASLSSNHSLTSCFTNQGYFFFHLPDALEIEACQVYFTYDPYSEEDPDEGVAGAPTGSSPQPLQPLSGEDDAYCTFPSRDDLLLFSPSLLGGPSPPSTAPGGSGAGEERMPPSLQERVPRDWDPQPLGPPTPGVPDLVDFQPPPELVLREAGEEVPDAGPREGVSFPWSRPPGQGEFRALNARLPLNTDAYLSLQELQGQDPTHLV

SEQ ID NO: 36 - protein, 889 aa, Artificial Sequence
  BM NKG2D-IL15Rbeta-2 amino acid sequence
MALPVTALLLPLALLLHAARPDVVMTQSPLSLPVTPGEPASISCRSSQSLVHSNANTYLHWYLQKPGQSPQLLIYKVSNRFSGVPDRFSGSGSGTDFTLKISRVEAEDVGVYYCSQNTHVPPTFGQGTKLEIKRGGGGSGGGGSGGGGSQVQLVQSGAEVKKPGASVKVSCKASGYTFTDYEMHWVRQAPGQGLEWMGALDPKTGDTAYSQKFKGRVTLTADESTSTAYMELSSLRSEDTAVYYCTRFYSYTYWGQGTLVTVSSTTTPAPRPPTPAPTIASQPLSLRPEACRPAAGGAVHTRGLDFACDIYIWAPLAGTCGVLLLSLVITLYCKRGRKKLLYIFKQPFMRPVQTTQEEDGCSCRFPEEEEGGCELRVKFSRSADAPAYKQGQNQLYNELNLGRREEYDVLDKRRGRDPEMGGKPRRKNPQEGLYNELQKDKMAEAYSEIGMKGERRRGKGHDGLYQGLSTATKDTYDALHMQALPPRGSGATNFSLLKQAGDVEENPGPMALPVTALLLPLALLLHAARPSLFNQEVQIPLTESYCGPCPKNWICYKNNCYQFFDESKNWYESQASCMSQNASLLKVYSKEDQDLLKLVKSYHWMGLVHIPTNGSWQWEDGSILSPNLLTIIEMQKGDCALYASSFKGYIENCSTPNTYICMQRTVSDPTRVETATETAWISLVTALHLVLGLSAVLGLLLLRWQFPAHYRRLRHALWPSLPDLHRVLGQYLRDTAALSPPKATVSDTCEEVEPSLLEILPKSSERTPLPLEPASLSSNHSLTSCFTNQGYFFFHLPDALEIEACQVYFTYDPYSEEDPDEGVAGAPTGSSPQPLQPLSGEDDAYCTFPSRDDLLLFSEFRALNARLPLNTDAYLSLQELQGQDPTHLV

SEQ ID NO: 37 - protein, 833 aa, Artificial Sequence
  BM NKG2D-IL15Rbeta-3 amino acid sequence
MALPVTALLLPLALLLHAARPDVVMTQSPLSLPVTPGEPASISCRSSQSLVHSNANTYLHWYLQKPGQSPQLLIYKVSNRFSGVPDRFSGSGSGTDFTLKISRVEAEDVGVYYCSQNTHVPPTFGQGTKLEIKRGGGGSGGGGSGGGGSQVQLVQSGAEVKKPGASVKVSCKASGYTFTDYEMHWVRQAPGQGLEWMGALDPKTGDTAYSQKFKGRVTLTADESTSTAYMELSSLRSEDTAVYYCTRFYSYTYWGQGTLVTVSSTTTPAPRPPTPAPTIASQPLSLRPEACRPAAGGAVHTRGLDFACDIYIWAPLAGTCGVLLLSLVITLYCKRGRKKLLYIFKQPFMRPVQTTQEEDGCSCRFPEEEEGGCELRVKFSRSADAPAYKQGQNQLYNELNLGRREEYDVLDKRRGRDPEMGGKPRRKNPQEGLYNELQKDKMAEAYSEIGMKGERRRGKGHDGLYQGLSTATKDTYDALHMQALPPRGSGATNFSLLKQAGDVEENPGPMALPVTALLLPLALLLHAARPSLFNQEVQIPLTESYCGPCPKNWICYKNNCYQFFDESKNWYESQASCMSQNASLLKVYSKEDQDLLKLVKSYHWMGLVHIPTNGSWQWEDGSILSPNLLTIIEMQKGDCALYASSFKGYIENCSTPNTYICMQRTVSDPTRVETATETAWISLVTALHLVLGLSAVLGLLLLRWQFPAHYRRLRHALWPSLPDLHRVLGQYLRDTAALSPPKATVSDTCEEVEPSLLEILPKSSERTPLPLTGSSPQPLQPLSGEDDAYCTFPSRDDLLLFSEFRALNARLPLNTDAYLSLQELQGQDPTHLV

SEQ ID NO: 38 - protein, 941 aa, Artificial Sequence
  BM NKG2D-IL-18Ralpha amino acid sequence
MALPVTALLLPLALLLHAARPDVVMTQSPLSLPVTPGEPASISCRSSQSLVHSNANTYLHWYLQKPGQSPQLLIYKVSNRFSGVPDRFSGSGSGTDFTLKISRVEAEDVGVYYCSQNTHVPPTFGQGTKLEIKRGGGGSGGGGSGGGGSQVQLVQSGAEVKKPGASVKVSCKASGYTFTDYEMHWVRQAPGQGLEWMGALDPKTGDTAYSQKFKGRVTLTADESTSTAYMELSSLRSEDTAVYYCTRFYSYTYWGQGTLVTVSSTTTPAPRPPTPAPTIASQPLSLRPEACRPAAGGAVHTRGLDFACDIYIWAPLAGTCGVLLLSLVITLYCKRGRKKLLYIFKQPFMRPVQTTQEEDGCSCRFPEEEEGGCELRVKFSRSADAPAYKQGQNQLYNELNLGRREEYDVLDKRRGRDPEMGGKPRRKNPQEGLYNELQKDKMAEAYSEIGMKGERRRGKGHDGLYQGLSTATKDTYDALHMQALPPRGSGATNFSLLKQAGDVEENPGPMALPVTALLLPLALLLHAARPSLFNQEVQIPLTESYCGPCPKNWICYKNNCYQFFDESKNWYESQASCMSQNASLLKVYSKEDQDLLKLVKSYHWMGLVHIPTNGSWQWEDGSILSPNLLTIIEMQKGDCALYASSFKGYIENCSTPNTYICMQRTVSDPTRVETATETAWISLVTALHLVLGLSAVLGLLLLRWQFPAHYRRLRHALWPSLPDLHRVLGQYLRDTAALSPPKATVSDTCEEVEPSLLEILPKSSERTPLPLHLTRRDETLTDGKTYDAFVSYLKECRPENGEEHTFAVEILPRVLEKHFGYKLCIFERDVVPGGAVVDEIHSLIEKSRRLIIVLSKSYMSNEVRYELESGLHEALVERKIKIILIEFTPVTDFTFLPQSLKLLKSHRVLKWKADKSLSYNSRFWKNLLYLMPAKTVKPGRD

SEQ ID NO: 39 - protein, 961 aa, Artificial Sequence
  BM NKG2D-IL-18Rbeta amino acid sequence
MALPVTALLLPLALLLHAARPDVVMTQSPLSLPVTPGEPASISCRSSQSLVHSNANTYLHWYLQKPGQSPQLLIYKVSNRFSGVPDRFSGSGSGTDFTLKISRVEAEDVGVYYCSQNTHVPPTFGQGTKLEIKRGGGGSGGGGSGGGGSQVQLVQSGAEVKKPGASVKVSCKASGYTFTDYEMHWVRQAPGQGLEWMGALDPKTGDTAYSQKFKGRVTLTADESTSTAYMELSSLRSEDTAVYYCTRFYSYTYWGQGTLVTVSSTTTPAPRPPTPAPTIASQPLSLRPEACRPAAGGAVHTRGLDFACDIYIWAPLAGTCGVLLLSLVITLYCKRGRKKLLYIFKQPFMRPVQTTQEEDGCSCRFPEEEEGGCELRVKFSRSADAPAYKQGQNQLYNELNLGRREEYDVLDKRRGRDPEMGGKPRRKNPQEGLYNELQKDKMAEAYSEIGMKGERRRGKGHDGLYQGLSTATKDTYDALHMQALPPRGSGATNFSLLKQAGDVEENPGPMALPVTALLLPLALLLHAARPSLFNQEVQIPLTESYCGPCPKNWICYKNNCYQFFDESKNWYESQASCMSQNASLLKVYSKEDQDLLKLVKSYHWMGLVHIPTNGSWQWEDGSILSPNLLTIIEMQKGDCALYASSFKGYIENCSTPNTYICMQRTVSDPTRVETATETAWISLVTALHLVLGLSAVLGLLLLRWQFPAHYRRLRHALWPSLPDLHRVLGQYLRDTAALSPPKATVSDTCEEVEPSLLEILPKSSERTPLPLLYRHWIEIVLLYRTYQSKDQTLGDKKDFDAFVSYAKWSSFPSEATSSLSEEHLALSLFPDVLENKYGYSLCLLERDVAPGGVYAEDIVSIIKRSRRGIFILSPNYVNGPSIFELQAAVNLALDDQTLKLILIKFCYFQEPESLPHLVKKALRVLPTVTWRGLKSVPPNSRFWAKMRYHMPVKNSQGFTWN

SEQ ID NO: 40 - protein, 882 aa, Artificial Sequence
  BM NKG2D-IL-21R-1 amino acid sequence
MALPVTALLLPLALLLHAARPDVVMTQSPLSLPVTPGEPASISCRSSQSLVHSNANTYLHWYLQKPGQSPQLLIYKVSNRFSGVPDRFSGSGSGTDFTLKISRVEAEDVGVYYCSQNTHVPPTFGQGTKLEIKRGGGGSGGGGSGGGGSQVQLVQSGAEVKKPGASVKVSCKASGYTFTDYEMHWVRQAPGQGLEWMGALDPKTGDTAYSQKFKGRVTLTADESTSTAYMELSSLRSEDTAVYYCTRFYSYTYWGQGTLVTVSSTTTPAPRPPTPAPTIASQPLSLRPEACRPAAGGAVHTRGLDFACDIYIWAPLAGTCGVLLLSLVITLYCKRGRKKLLYIFKQPFMRPVQTTQEEDGCSCRFPEEEEGGCELRVKFSRSADAPAYKQGQNQLYNELNLGRREEYDVLDKRRGRDPEMGGKPRRKNPQEGLYNELQKDKMAEAYSEIGMKGERRRGKGHDGLYQGLSTATKDTYDALHMQALPPRGSGATNFSLLKQAGDVEENPGPMALPVTALLLPLALLLHAARPSLFNQEVQIPLTESYCGPCPKNWICYKNNCYQFFDESKNWYESQASCMSQNASLLKVYSKEDQDLLKLVKSYHWMGLVHIPTNGSWQWEDGSILSPNLLTIIEMQKGDCALYASSFKGYIENCSTPNTYICMQRTVSDPTRVETATETAWISLVTALHLVLGLSAVLGLLLLRWQFPAHYRRLRHALWPSLPDLHRVLGQYLRDTAALSPPKATVSDTCEEVEPSLLEILPKSSERTPLPLLELGPWSPEVPSTLEVYSCHPPRSPAKRLQLTELQEPAELVESDGVPKPSFWPTAQNSGGSAYSEERDRPYGLVSIDTVTVLDAEGPCTWPCSCEDDGYPALDLDAGLEPS

SEQ ID NO: 41 - protein, 806 aa, Artificial Sequence
  BM NKG2D-IL-21R-2 amino acid sequence
MALPVTALLLPLALLLHAARPDVVMTQSPLSLPVTPGEPASISCRSSQSLVHSNANTYLHWYLQKPGQSPQLLIYKVSNRFSGVPDRFSGSGSGTDFTLKISRVEAEDVGVYYCSQNTHVPPTFGQGTKLEIKRGGGGSGGGGSGGGGSQVQLVQSGAEVKKPGASVKVSCKASGYTFTDYEMHWVRQAPGQGLEWMGALDPKTGDTAYSQKFKGRVTLTADESTSTAYMELSSLRSEDTAVYYCTRFYSYTYWGQGTLVTVSSTTTPAPRPPTPAPTIASQPLSLRPEACRPAAGGAVHTRGLDFACDIYIWAPLAGTCGVLLLSLVITLYCKRGRKKLLYIFKQPFMRPVQTTQEEDGCSCRFPEEEEGGCELRVKFSRSADAPAYKQGQNQLYNELNLGRREEYDVLDKRRGRDPEMGGKPRRKNPQEGLYNELQKDKMAEAYSEIGMKGERRRGKGHDGLYQGLSTATKDTYDALHMQALPPRGSGATNFSLLKQAGDVEENPGPMALPVTALLLPLALLLHAARPSLFNQEVQIPLTESYCGPCPKNWICYKNNCYQFFDESKNWYESQASCMSQNASLLKVYSKEDQDLLKLVKSYHWMGLVHIPTNGSWQWEDGSILSPNLLTIIEMQKGDCALYASSFKGYIENCSTPNTYICMQRTVSDPTRVETATETAWISLVTALHLVLGLSAVLGLLLLRWQFPAHYRRLRHALWPSLPDLHRVLGQYLRDTAALSPPKATVSDTCEEVEPSLLEILPKSSERTPLPLECDFTSPGDEGPPRSYLRQWVVIPPPLSSPGPQAS

SEQ ID NO: 42 - protein, 917 aa, Artificial Sequence
  BM NKG2D-IL-21R-3 amino acid sequence
MALPVTALLLPLALLLHAARPDVVMTQSPLSLPVTPGEPASISCRSSQSLVHSNANTYLHWYLQKPGQSPQLLIYKVSNRFSGVPDRFSGSGSGTDFTLKISRVEAEDVGVYYCSQNTHVPPTFGQGTKLEIKRGGGGSGGGGSGGGGSQVQLVQSGAEVKKPGASVKVSCKASGYTFTDYEMHWVRQAPGQGLEWMGALDPKTGDTAYSQKFKGRVTLTADESTSTAYMELSSLRSEDTAVYYCTRFYSYTYWGQGTLVTVSSTTTPAPRPPTPAPTIASQPLSLRPEACRPAAGGAVHTRGLDFACDIYIWAPLAGTCGVLLLSLVITLYCKRGRKKLLYIFKQPFMRPVQTTQEEDGCSCRFPEEEEGGCELRVKFSRSADAPAYKQGQNQLYNELNLGRREEYDVLDKRRGRDPEMGGKPRRKNPQEGLYNELQKDKMAEAYSEIGMKGERRRGKGHDGLYQGLSTATKDTYDALHMQALPPRGSGATNFSLLKQAGDVEENPGPMALPVTALLLPLALLLHAARPSLFNQEVQIPLTESYCGPCPKNWICYKNNCYQFFDESKNWYESQASCMSQNASLLKVYSKEDQDLLKLVKSYHWMGLVHIPTNGSWQWEDGSILSPNLLTIIEMQKGDCALYASSFKGYIENCSTPNTYICMQRTVSDPTRVETATETAWISLVTALHLVLGLSAVLGLLLLRWQFPAHYRRLRHALWPSLPDLHRVLGQYLRDTAALSPPKATVSDTCEEVEPSLLEILPKSSERTPLPLLELGPWSPEVPSTLEVYSCHPPRSPAKRLQLTELQEPAELVESDGVPKPSFWPTAQNSGGSAYSEERDRPYGLVSIDTVTVLDAEGPCTWPCSCEDDGYPALDLDAGLEPSECDFTSPGDEGPPRSYLRQWVVIPPPLSSPGPQAS

SEQ ID NO: 43 - protein, 891 aa, Artificial Sequence
  BM NKG2D-IL-23R-1 amino acid sequence
MALPVTALLLPLALLLHAARPDVVMTQSPLSLPVTPGEPASISCRSSQSLVHSNANTYLHWYLQKPGQSPQLLIYKVSNRFSGVPDRFSGSGSGTDFTLKISRVEAEDVGVYYCSQNTHVPPTFGQGTKLEIKRGGGGSGGGGSGGGGSQVQLVQSGAEVKKPGASVKVSCKASGYTFTDYEMHWVRQAPGQGLEWMGALDPKTGDTAYSQKFKGRVTLTADESTSTAYMELSSLRSEDTAVYYCTRFYSYTYWGQGTLVTVSSTTTPAPRPPTPAPTIASQPLSLRPEACRPAAGGAVHTRGLDFACDIYIWAPLAGTCGVLLLSLVITLYCKRGRKKLLYIFKQPFMRPVQTTQEEDGCSCRFPEEEEGGCELRVKFSRSADAPAYKQGQNQLYNELNLGRREEYDVLDKRRGRDPEMGGKPRRKNPQEGLYNELQKDKMAEAYSEIGMKGERRRGKGHDGLYQGLSTATKDTYDALHMQALPPRGSGATNFSLLKQAGDVEENPGPMALPVTALLLPLALLLHAARPSLFNQEVQIPLTESYCGPCPKNWICYKNNCYQFFDESKNWYESQASCMSQNASLLKVYSKEDQDLLKLVKSYHWMGLVHIPTNGSWQWEDGSILSPNLLTIIEMQKGDCALYASSFKGYIENCSTPNTYICMQRTVSDPTRVETATETAWISLVTALHLVLGLSAVLGLLLLRWQFPAHYRRLRHALWPSLPDLHRVLGQYLRDTAALSPPKATVSDTCEEVEPSLLEILPKSSERTPLPLRTGIKRRILLLIPKWLYEDIPNMKNSNVVKMLQENSELMNNNSSEQVLYVDPMITEIKEIFIPEHKPTDYKKENTGPLETRDYPQNSLFDNTTVVYIPDLNTGYKPQISNFLPEGSHLSN

SEQ ID NO: 44 - protein, 804 aa, Artificial Sequence
  BM NKG2D-IL-23R-2 amino acid sequence
MALPVTALLLPLALLLHAARPDVVMTQSPLSLPVTPGEPASISCRSSQSLVHSNANTYLHWYLQKPGQSPQLLIYKVSNRFSGVPDRFSGSGSGTDFTLKISRVEAEDVGVYYCSQNTHVPPTFGQGTKLEIKRGGGGSGGGGSGGGGSQVQLVQSGAEVKKPGASVKVSCKASGYTFTDYEMHWVRQAPGQGLEWMGALDPKTGDTAYSQKFKGRVTLTADESTSTAYMELSSLRSEDTAVYYCTRFYSYTYWGQGTLVTVSSTTTPAPRPPTPAPTIASQPLSLRPEACRPAAGGAVHTRGLDFACDIYIWAPLAGTCGVLLLSLVITLYCKRGRKKLLYIFKQPFMRPVQTTQEEDGCSCRFPEEEEGGCELRVKFSRSADAPAYKQGQNQLYNELNLGRREEYDVLDKRRGRDPEMGGKPRRKNPQEGLYNELQKDKMAEAYSEIGMKGERRRGKGHDGLYQGLSTATKDTYDALHMQALPPRGSGATNFSLLKQAGDVEENPGPMALPVTALLLPLALLLHAARPSLFNQEVQIPLTESYCGPCPKNWICYKNNCYQFFDESKNWYESQASCMSQNASLLKVYSKEDQDLLKLVKSYHWMGLVHIPTNGSWQWEDGSILSPNLLTIIEMQKGDCALYASSFKGYIENCSTPNTYICMQRTVSDPTRVETATETAWISLVTALHLVLGLSAVLGLLLLRWQFPAHYRRLRHALWPSLPDLHRVLGQYLRDTAALSPPKATVSDTCEEVEPSLLEILPKSSERTPLPLEFVSCLGIVNEELPSINTYFPQNILESHFNRIS

SEQ ID NO: 45 - protein, 924 aa, Artificial Sequence
  BM NKG2D-IL-23R-3 amino acid sequence
MALPVTALLLPLALLLHAARPDVVMTQSPLSLPVTPGEPASISCRSSQSLVHSNANTYLHWYLQKPGQSPQLLIYKVSNRFSGVPDRFSGSGSGTDFTLKISRVEAEDVGVYYCSQNTHVPPTFGQGTKLEIKRGGGGSGGGGSGGGGSQVQLVQSGAEVKKPGASVKVSCKASGYTFTDYEMHWVRQAPGQGLEWMGALDPKTGDTAYSQKFKGRVTLTADESTSTAYMELSSLRSEDTAVYYCTRFYSYTYWGQGTLVTVSSTTTPAPRPPTPAPTIASQPLSLRPEACRPAAGGAVHTRGLDFACDIYIWAPLAGTCGVLLLSLVITLYCKRGRKKLLYIFKQPFMRPVQTTQEEDGCSCRFPEEEEGGCELRVKFSRSADAPAYKQGQNQLYNELNLGRREEYDVLDKRRGRDPEMGGKPRRKNPQEGLYNELQKDKMAEAYSEIGMKGERRRGKGHDGLYQGLSTATKDTYDALHMQALPPRGSGATNFSLLKQAGDVEENPGPMALPVTALLLPLALLLHAARPSLFNQEVQIPLTESYCGPCPKNWICYKNNCYQFFDESKNWYESQASCMSQNASLLKVYSKEDQDLLKLVKSYHWMGLVHIPTNGSWQWEDGSILSPNLLTIIEMQKGDCALYASSFKGYIENCSTPNTYICMQRTVSDPTRVETATETAWISLVTALHLVLGLSAVLGLLLLRWQFPAHYRRLRHALWPSLPDLHRVLGQYLRDTAALSPPKATVSDTCEEVEPSLLEILPKSSERTPLPLRTGIKRRILLLIPKWLYEDIPNMKNSNVVKMLQENSELMNNNSSEQVLYVDPMITEIKEIFIPEHKPTDYKKENTGPLETRDYPQNSLFDNTTVVYIPDLNTGYKPQISNFLPEGSHLSNEFVSCLGIVNEELPSINTYFPQNILESHFNRIS

SEQ ID NO: 46 - protein, 801 aa, Artificial Sequence
  BM NKG2D-GM-CSFRalpha amino acid sequence
MALPVTALLLPLALLLHAARPDVVMTQSPLSLPVTPGEPASISCRSSQSLVHSNANTYLHWYLQKPGQSPQLLIYKVSNRFSGVPDRFSGSGSGTDFTLKISRVEAEDVGVYYCSQNTHVPPTFGQGTKLEIKRGGGGSGGGGSGGGGSQVQLVQSGAEVKKPGASVKVSCKASGYTFTDYEMHWVRQAPGQGLEWMGALDPKTGDTAYSQKFKGRVTLTADESTSTAYMELSSLRSEDTAVYYCTRFYSYTYWGQGTLVTVSSTTTPAPRPPTPAPTIASQPLSLRPEACRPAAGGAVHTRGLDFACDIYIWAPLAGTCGVLLLSLVITLYCKRGRKKLLYIFKQPFMRPVQTTQEEDGCSCRFPEEEEGGCELRVKFSRSADAPAYKQGQNQLYNELNLGRREEYDVLDKRRGRDPEMGGKPRRKNPQEGLYNELQKDKMAEAYSEIGMKGERRRGKGHDGLYQGLSTATKDTYDALHMQALPPRGSGATNFSLLKQAGDVEENPGPMALPVTALLLPLALLLHAARPSLFNQEVQIPLTESYCGPCPKNWICYKNNCYQFFDESKNWYESQASCMSQNASLLKVYSKEDQDLLKLVKSYHWMGLVHIPTNGSWQWEDGSILSPNLLTIIEMQKGDCALYASSFKGYIENCSTPNTYICMQRTVSDPTRVETATETAWISLVTALHLVLGLSAVLGLLLLRWQFPAHYRRLRHALWPSLPDLHRVLGQYLRDTAALSPPKATVSDTCEEVEPSLLEILPKSSERTPLPLEVEDEIIWEEFTPEEGKGYREEVLTVKEIT

SEQ ID NO: 47 - protein, 890 aa, Artificial Sequence
  BM NKG2D-GM-CSFRbeta-1 amino acid sequence
MALPVTALLLPLALLLHAARPDVVMTQSPLSLPVTPGEPASISCRSSQSLVHSNANTYLHWYLQKPGQSPQLLIYKVSNRFSGVPDRFSGSGSGTDFTLKISRVEAEDVGVYYCSQNTHVPPTFGQGTKLEIKRGGGGSGGGGSGGGGSQVQLVQSGAEVKKPGASVKVSCKASGYTFTDYEMHWVRQAPGQGLEWMGALDPKTGDTAYSQKFKGRVTLTADESTSTAYMELSSLRSEDTAVYYCTRFYSYTYWGQGTLVTVSSTTTPAPRPPTPAPTIASQPLSLRPEACRPAAGGAVHTRGLDFACDIYIWAPLAGTCGVLLLSLVITLYCKRGRKKLLYIFKQPFMRPVQTTQEEDGCSCRFPEEEEGGCELRVKFSRSADAPAYKQGQNQLYNELNLGRREEYDVLDKRRGRDPEMGGKPRRKNPQEGLYNELQKDKMAEAYSEIGMKGERRRGKGHDGLYQGLSTATKDTYDALHMQALPPRGSGATNFSLLKQAGDVEENPGPMALPVTALLLPLALLLHAARPSLFNQEVQIPLTESYCGPCPKNWICYKNNCYQFFDESKNWYESQASCMSQNASLLKVYSKEDQDLLKLVKSYHWMGLVHIPTNGSWQWEDGSILSPNLLTIIEMQKGDCALYASSFKGYIENCSTPNTYICMQRTVSDPTRVETATETAWISLVTALHLVLGLSAVLGLLLLRWQFPAHYRRLRHALWPSLPDLHRVLGQYLRDTAALSPPKATVSDTCEEVEPSLLEILPKSSERTPLPLDTEDPGVASGYVSSADLVFTPNSGASSVSGPPGAPGPVKSGFEGYVELPPIEGRSPRSQPEGLLVLQQVGDYCFLPGLGPGPLSLRSKQVPVIQLFKALKQQDYLSLPPWEVNKPGEVC

SEQ ID NO: 48 - protein, 954 aa, Artificial Sequence
  BM NKG2D-GM-CSFRbeta-2 amino acid sequence
MALPVTALLLPLALLLHAARPDVVMTQSPLSLPVTPGEPASISCRSSQSLVHSNANTYLHWYLQKPGQSPQLLIYKVSNRFSGVPDRFSGSGSGTDFTLKISRVEAEDVGVYYCSQNTHVPPTFGQGTKLEIKRGGGGSGGGGSGGGGSQVQLVQSGAEVKKPGASVKVSCKASGYTFTDYEMHWVRQAPGQGLEWMGALDPKTGDTAYSQKFKGRVTLTADESTSTAYMELSSLRSEDTAVYYCTRFYSYTYWGQGTLVTVSSTTTPAPRPPTPAPTIASQPLSLRPEACRPAAGGAVHTRGLDFACDIYIWAPLAGTCGVLLLSLVITLYCKRGRKKLLYIFKQPFMRPVQTTQEEDGCSCRFPEEEEGGCELRVKFSRSADAPAYKQGQNQLYNELNLGRREEYDVLDKRRGRDPEMGGKPRRKNPQEGLYNELQKDKMAEAYSEIGMKGERRRGKGHDGLYQGLSTATKDTYDALHMQALPPRGSGATNFSLLKQAGDVEENPGPMALPVTALLLPLALLLHAARPSLFNQEVQIPLTESYCGPCPKNWICYKNNCYQFFDESKNWYESQASCMSQNASLLKVYSKEDQDLLKLVKSYHWMGLVHIPTNGSWQWEDGSILSPNLLTIIEMQKGDCALYASSFKGYIENCSTPNTYICMQRTVSDPTRVETATETAWISLVTALHLVLGLSAVLGLLLLRWQFPAHYRRLRHALWPSLPDLHRVLGQYLRDTAALSPPKATVSDTCEEVEPSLLEILPKSSERTPLPLEKQASSFDFNGPYLGPPHSRSLPDILGQPEPPQEGGSQKSPPPGSLEYLCLPAGGQVQLVPLAQDTEDPGVASGYVSSADLVFTPNSGASSVSGPPGAPGPVKSGFEGYVELPPIEGRSPRSQPEGLLVLQQVGDYCFLPGLGPGPLSLRSKQVPVIQLFKALKQQDYLSLPPWEVNKPGEVC

SEQ ID NO: 49 - protein, 926 aa, Artificial Sequence
  BM NKG2D-IL-9R-1 amino acid sequence
MALPVTALLLPLALLLHAARPDVVMTQSPLSLPVTPGEPASISCRSSQSLVHSNANTYLHWYLQKPGQSPQLLIYKVSNRFSGVPDRFSGSGSGTDFTLKISRVEAEDVGVYYCSQNTHVPPTFGQGTKLEIKRGGGGSGGGGSGGGGSQVQLVQSGAEVKKPGASVKVSCKASGYTFTDYEMHWVRQAPGQGLEWMGALDPKTGDTAYSQKFKGRVTLTADESTSTAYMELSSLRSEDTAVYYCTRFYSYTYWGQGTLVTVSSTTTPAPRPPTPAPTIASQPLSLRPEACRPAAGGAVHTRGLDFACDIYIWAPLAGTCGVLLLSLVITLYCKRGRKKLLYIFKQPFMRPVQTTQEEDGCSCRFPEEEEGGCELRVKFSRSADAPAYKQGQNQLYNELNLGRREEYDVLDKRRGRDPEMGGKPRRKNPQEGLYNELQKDKMAEAYSEIGMKGERRRGKGHDGLYQGLSTATKDTYDALHMQALPPRGSGATNFSLLKQAGDVEENPGPMALPVTALLLPLALLLHAARPSLFNQEVQIPLTESYCGPCPKNWICYKNNCYQFFDESKNWYESQASCMSQNASLLKVYSKEDQDLLKLVKSYHWMGLVHIPTNGSWQWEDGSILSPNLLTIIEMQKGDCALYASSFKGYIENCSTPNTYICMQRTVSDPTRVETATETAWISLVTALHLVLGLSAVLGLLLLRWQFPAHYRRLRHALWPSLPDLHRVLGQYLRDTAALSPPKATVSDTCEEVEPSLLEILPKSSERTPLPLMFFQPLYSVHNGNFQTWMGAHGAGVLLSQDCAGTPQGALEPCVQEATALLTCGPARPWKSVALEEEQEGPGTRLPGNLSSEDVLPAGCTEWRVQTLAYLPQEDWAPTSLTRPAPPDSEGSRSSSSSSSSNNNNYCALGCYGGWHLSALPGNTQSS

SEQ ID NO: 50 - protein, 845 aa, Artificial Sequence
  BM NKG2D-IL-9R-2 amino acid sequence
MALPVTALLLPLALLLHAARPDVVMTQSPLSLPVTPGEPASISCRSSQSLVHSNANTYLHWYLQKPGQSPQLLIYKVSNRFSGVPDRFSGSGSGTDFTLKISRVEAEDVGVYYCSQNTHVPPTFGQGTKLEIKRGGGGSGGGGSGGGGSQVQLVQSGAEVKKPGASVKVSCKASGYTFTDYEMHWVRQAPGQGLEWMGALDPKTGDTAYSQKFKGRVTLTADESTSTAYMELSSLRSEDTAVYYCTRFYSYTYWGQGTLVTVSSTTTPAPRPPTPAPTIASQPLSLRPEACRPAAGGAVHTRGLDFACDIYIWAPLAGTCGVLLLSLVITLYCKRGRKKLLYIFKQPFMRPVQTTQEEDGCSCRFPEEEEGGCELRVKFSRSADAPAYKQGQNQLYNELNLGRREEYDVLDKRRGRDPEMGGKPRRKNPQEGLYNELQKDKMAEAYSEIGMKGERRRGKGHDGLYQGLSTATKDTYDALHMQALPPRGSGATNFSLLKQAGDVEENPGPMALPVTALLLPLALLLHAARPSLFNQEVQIPLTESYCGPCPKNWICYKNNCYQFFDESKNWYESQASCMSQNASLLKVYSKEDQDLLKLVKSYHWMGLVHIPTNGSWQWEDGSILSPNLLTIIEMQKGDCALYASSFKGYIENCSTPNTYICMQRTVSDPTRVETATETAWISLVTALHLVLGLSAVLGLLLLRWQFPAHYRRLRHALWPSLPDLHRVLGQYLRDTAALSPPKATVSDTCEEVEPSLLEILPKSSERTPLPLDVLPAGCTEWRVQTLAYLPQEDWAPTSLTRPAPPDSEGSRSSSSSSSSNNNNYCALGCYGGWHLSALPGNTQSS

SEQ ID NO: 51 - protein, 873 aa, Artificial Sequence
  BM NKG2D-IL-9R-3 amino acid sequence
MALPVTALLLPLALLLHAARPDVVMTQSPLSLPVTPGEPASISCRSSQSLVHSNANTYLHWYLQKPGQSPQLLIYKVSNRFSGVPDRFSGSGSGTDFTLKISRVEAEDVGVYYCSQNTHVPPTFGQGTKLEIKRGGGGSGGGGSGGGGSQVQLVQSGAEVKKPGASVKVSCKASGYTFTDYEMHWVRQAPGQGLEWMGALDPKTGDTAYSQKFKGRVTLTADESTSTAYMELSSLRSEDTAVYYCTRFYSYTYWGQGTLVTVSSTTTPAPRPPTPAPTIASQPLSLRPEACRPAAGGAVHTRGLDFACDIYIWAPLAGTCGVLLLSLVITLYCKRGRKKLLYIFKQPFMRPVQTTQEEDGCSCRFPEEEEGGCELRVKFSRSADAPAYKQGQNQLYNELNLGRREEYDVLDKRRGRDPEMGGKPRRKNPQEGLYNELQKDKMAEAYSEIGMKGERRRGKGHDGLYQGLSTATKDTYDALHMQALPPRGSGATNFSLLKQAGDVEENPGPMALPVTALLLPLALLLHAARPSLFNQEVQIPLTESYCGPCPKNWICYKNNCYQFFDESKNWYESQASCMSQNASLLKVYSKEDQDLLKLVKSYHWMGLVHIPTNGSWQWEDGSILSPNLLTIIEMQKGDCALYASSFKGYIENCSTPNTYICMQRTVSDPTRVETATETAWISLVTALHLVLGLSAVLGLLLLRWQFPAHYRRLRHALWPSLPDLHRVLGQYLRDTAALSPPKATVSDTCEEVEPSLLEILPKSSERTPLPLMFFQPLYSVHNGNFQTWMGAHGAGVLLSDVLPAGCTEWRVQTLAYLPQEDWAPTSLTRPAPPDSEGSRSSSSSSSSNNNNYCALGCYGGWHLSALPGNTQSS

SEQ ID NO: 52 - protein, 966 aa, Artificial Sequence
  BM NKG2D-IL-7Ralpha-IL12Rbeta1 amino acid sequence
MALPVTALLLPLALLLHAARPDVVMTQSPLSLPVTPGEPASISCRSSQSLVHSNANTYLHWYLQKPGQSPQLLIYKVSNRFSGVPDRFSGSGSGTDFTLKISRVEAEDVGVYYCSQNTHVPPTFGQGTKLEIKRGGGGSGGGGSGGGGSQVQLVQSGAEVKKPGASVKVSCKASGYTFTDYEMHWVRQAPGQGLEWMGALDPKTGDTAYSQKFKGRVTLTADESTSTAYMELSSLRSEDTAVYYCTRFYSYTYWGQGTLVTVSSTTTPAPRPPTPAPTIASQPLSLRPEACRPAAGGAVHTRGLDFACDIYIWAPLAGTCGVLLLSLVITLYCKRGRKKLLYIFKQPFMRPVQTTQEEDGCSCRFPEEEEGGCELRVKFSRSADAPAYKQGQNQLYNELNLGRREEYDVLDKRRGRDPEMGGKPRRKNPQEGLYNELQKDKMAEAYSEIGMKGERRRGKGHDGLYQGLSTATKDTYDALHMQALPPRGSGATNFSLLKQAGDVEENPGPMALPVTALLLPLALLLHAARPSLFNQEVQIPLTESYCGPCPKNWICYKNNCYQFFDESKNWYESQASCMSQNASLLKVYSKEDQDLLKLVKSYHWMGLVHIPTNGSWQWEDGSILSPNLLTIIEMQKGDCALYASSFKGYIENCSTPNTYICMQRTVSDPTRVETATETAWISLVTALHLVLGLSAVLGLLLLRWQFPAHYRRLRHALWPSLPDLHRVLGQYLRDTAALSPPKATVSDTCEEVEPSLLEILPKSSERTPLPLARDEVEGFLQDTFPQQLEESEKQRLGGDVQSPNCPSEDVVITPESFGRDSSLTCLAGNVSACDAPILSSSRSLDCRESGKNGPHVYQDLLLSLGTTNSTLPPPFSLQSGILTLNPVAQGQPILTSLGSNQEEAYVTMSSFYQNQSLQEALVVEMSWDKGERTEPLEKTELPEGAPELALDTELSLEDGDRCKAKM

SEQ ID NO: 53 - protein, 954 aa, Artificial Sequence
  BM NKG2D-IL-7Ralpha-IL15Ralpha amino acid sequence
MALPVTALLLPLALLLHAARPDVVMTQSPLSLPVTPGEPASISCRSSQSLVHSNANTYLHWYLQKPGQSPQLLIYKVSNRFSGVPDRFSGSGSGTDFTLKISRVEAEDVGVYYCSQNTHVPPTFGQGTKLEIKRGGGGSGGGGSGGGGSQVQLVQSGAEVKKPGASVKVSCKASGYTFTDYEMHWVRQAPGQGLEWMGALDPKTGDTAYSQKFKGRVTLTADESTSTAYMELSSLRSEDTAVYYCTRFYSYTYWGQGTLVTVSSTTTPAPRPPTPAPTIASQPLSLRPEACRPAAGGAVHTRGLDFACDIYIWAPLAGTCGVLLLSLVITLYCKRGRKKLLYIFKQPFMRPVQTTQEEDGCSCRFPEEEEGGCELRVKFSRSADAPAYKQGQNQLYNELNLGRREEYDVLDKRRGRDPEMGGKPRRKNPQEGLYNELQKDKMAEAYSEIGMKGERRRGKGHDGLYQGLSTATKDTYDALHMQALPPRGSGATNFSLLKQAGDVEENPGPMALPVTALLLPLALLLHAARPSLFNQEVQIPLTESYCGPCPKNWICYKNNCYQFFDESKNWYESQASCMSQNASLLKVYSKEDQDLLKLVKSYHWMGLVHIPTNGSWQWEDGSILSPNLLTIIEMQKGDCALYASSFKGYIENCSTPNTYICMQRTVSDPTRVETATETAWISLVTALHLVLGLSAVLGLLLLRWQFPAHYRRLRHALWPSLPDLHRVLGQYLRDTAALSPPKATVSDTCEEVEPSLLEILPKSSERTPLPLARDEVEGFLQDTFPQQLEESEKQRLGGDVQSPNCPSEDVVITPESFGRDSSLTCLAGNVSACDAPILSSSRSLDCRESGKNGPHVYQDLLLSLGTTNSTLPPPFSLQSGILTLNPVAQGQPILTSLGSNQEEAYVTMSSFYQNQKSRQTPPLASVEMEAMEALPVTWGTSSRDEDLENCSHHL

SEQ ID NO: 54 - protein, 1134 aa, Artificial Sequence
  BM NKG2D-IL-7Ralpha-IL15Rbeta-1 amino acid sequence
MALPVTALLLPLALLLHAARPDVVMTQSPLSLPVTPGEPASISCRSSQSLVHSNANTYLHWYLQKPGQSPQLLIYKVSNRFSGVPDRFSGSGSGTDFTLKISRVEAEDVGVYYCSQNTHVPPTFGQGTKLEIKRGGGGSGGGGSGGGGSQVQLVQSGAEVKKPGASVKVSCKASGYTFTDYEMHWVRQAPGQGLEWMGALDPKTGDTAYSQKFKGRVTLTADESTSTAYMELSSLRSEDTAVYYCTRFYSYTYWGQGTLVTVSSTTTPAPRPPTPAPTIASQPLSLRPEACRPAAGGAVHTRGLDFACDIYIWAPLAGTCGVLLLSLVITLYCKRGRKKLLYIFKQPFMRPVQTTQEEDGCSCRFPEEEEGGCELRVKFSRSADAPAYKQGQNQLYNELNLGRREEYDVLDKRRGRDPEMGGKPRRKNPQEGLYNELQKDKMAEAYSEIGMKGERRRGKGHDGLYQGLSTATKDTYDALHMQALPPRGSGATNFSLLKQAGDVEENPGPMALPVTALLLPLALLLHAARPSLFNQEVQIPLTESYCGPCPKNWICYKNNCYQFFDESKNWYESQASCMSQNASLLKVYSKEDQDLLKLVKSYHWMGLVHIPTNGSWQWEDGSILSPNLLTIIEMQKGDCALYASSFKGYIENCSTPNTYICMQRTVSDPTRVETATETAWISLVTALHLVLGLSAVLGLLLLRWQFPAHYRRLRHALWPSLPDLHRVLGQYLRDTAALSPPKATVSDTCEEVEPSLLEILPKSSERTPLPLARDEVEGFLQDTFPQQLEESEKQRLGGDVQSPNCPSEDVVITPESFGRDSSLTCLAGNVSACDAPILSSSRSLDCRESGKNGPHVYQDLLLSLGTTNSTLPPPFSLQSGILTLNPVAQGQPILTSLGSNQEEAYVTMSSFYQNQVTQLLLQQDKVPEPASLSSNHSLTSCFTNQGYFFFHLPDALEIEACQVYFTYDPYSEEDPDEGVAGAPTGSSPQPLQPLSGEDDAYCTFPSRDDLLLFSPSLLGGPSPPSTAPGGSGAGEERMPPSLQERVPRDWDPQPLGPPTPGVPDLVDFQPPPELVLREAGEEVPDAGPREGVSFPWSRPPGQGEFRALNARLPLNTDAYLSLQELQGQDPTHLV

SEQ ID NO: 55 - protein, 1033 aa, Artificial Sequence
  BM NKG2D-IL-7Ralpha-IL15Rbeta-2 amino acid sequence
MALPVTALLLPLALLLHAARPDVVMTQSPLSLPVTPGEPASISCRSSQSLVHSNANTYLHWYLQKPGQSPQLLIYKVSNRFSGVPDRFSGSGSGTDFTLKISRVEAEDVGVYYCSQNTHVPPTFGQGTKLEIKRGGGGSGGGGSGGGGSQVQLVQSGAEVKKPGASVKVSCKASGYTFTDYEMHWVRQAPGQGLEWMGALDPKTGDTAYSQKFKGRVTLTADESTSTAYMELSSLRSEDTAVYYCTRFYSYTYWGQGTLVTVSSTTTPAPRPPTPAPTIASQPLSLRPEACRPAAGGAVHTRGLDFACDIYIWAPLAGTCGVLLLSLVITLYCKRGRKKLLYIFKQPFMRPVQTTQEEDGCSCRFPEEEEGGCELRVKFSRSADAPAYKQGQNQLYNELNLGRREEYDVLDKRRGRDPEMGGKPRRKNPQEGLYNELQKDKMAEAYSEIGMKGERRRGKGHDGLYQGLSTATKDTYDALHMQALPPRGSGATNFSLLKQAGDVEENPGPMALPVTALLLPLALLLHAARPSLFNQEVQIPLTESYCGPCPKNWICYKNNCYQFFDESKNWYESQASCMSQNASLLKVYSKEDQDLLKLVKSYHWMGLVHIPTNGSWQWEDGSILSPNLLTIIEMQKGDCALYASSFKGYIENCSTPNTYICMQRTVSDPTRVETATETAWISLVTALHLVLGLSAVLGLLLLRWQFPAHYRRLRHALWPSLPDLHRVLGQYLRDTAALSPPKATVSDTCEEVEPSLLEILPKSSERTPLPLARDEVEGFLQDTFPQQLEESEKQRLGGDVQSPNCPSEDVVITPESFGRDSSLTCLAGNVSACDAPILSSSRSLDCRESGKNGPHVYQDLLLSLGTTNSTLPPPFSLQSGILTLNPVAQGQPILTSLGSNQEEAYVTMSSFYQNQEPASLSSNHSLTSCFTNQGYFFFHLPDALEIEACQVYFTYDPYSEEDPDEGVAGAPTGSSPQPLQPLSGEDDAYCTFPSRDDLLLFSEFRALNARLPLNTDAYLSLQELQGQDPTHLV

SEQ ID NO: 56 - protein, 1026 aa, Artificial Sequence
  BM NKG2D-IL-7Ralpha-IL-21R-1 amino acid sequence
MALPVTALLLPLALLLHAARPDVVMTQSPLSLPVTPGEPASISCRSSQSLVHSNANTYLHWYLQKPGQSPQLLIYKVSNRFSGVPDRFSGSGSGTDFTLKISRVEAEDVGVYYCSQNTHVPPTFGQGTKLEIKRGGGGSGGGGSGGGGSQVQLVQSGAEVKKPGASVKVSCKASGYTFTDYEMHWVRQAPGQGLEWMGALDPKTGDTAYSQKFKGRVTLTADESTSTAYMELSSLRSEDTAVYYCTRFYSYTYWGQGTLVTVSSTTTPAPRPPTPAPTIASQPLSLRPEACRPAAGGAVHTRGLDFACDIYIWAPLAGTCGVLLLSLVITLYCKRGRKKLLYIFKQPFMRPVQTTQEEDGCSCRFPEEEEGGCELRVKFSRSADAPAYKQGQNQLYNELNLGRREEYDVLDKRRGRDPEMGGKPRRKNPQEGLYNELQKDKMAEAYSEIGMKGERRRGKGHDGLYQGLSTATKDTYDALHMQALPPRGSGATNFSLLKQAGDVEENPGPMALPVTALLLPLALLLHAARPSLFNQEVQIPLTESYCGPCPKNWICYKNNCYQFFDESKNWYESQASCMSQNASLLKVYSKEDQDLLKLVKSYHWMGLVHIPTNGSWQWEDGSILSPNLLTIIEMQKGDCALYASSFKGYIENCSTPNTYICMQRTVSDPTRVETATETAWISLVTALHLVLGLSAVLGLLLLRWQFPAHYRRLRHALWPSLPDLHRVLGQYLRDTAALSPPKATVSDTCEEVEPSLLEILPKSSERTPLPLARDEVEGFLQDTFPQQLEESEKQRLGGDVQSPNCPSEDVVITPESFGRDSSLTCLAGNVSACDAPILSSSRSLDCRESGKNGPHVYQDLLLSLGTTNSTLPPPFSLQSGILTLNPVAQGQPILTSLGSNQEEAYVTMSSFYQNQLELGPWSPEVPSTLEVYSCHPPRSPAKRLQLTELQEPAELVESDGVPKPSFWPTAQNSGGSAYSEERDRPYGLVSIDTVTVLDAEGPCTWPCSCEDDGYPALDLDAGLEPS

SEQ ID NO: 57 - protein, 950 aa, Artificial Sequence
  BM NKG2D-IL-7Ralpha-IL-21R-2 amino acid sequence
MALPVTALLLPLALLLHAARPDVVMTQSPLSLPVTPGEPASISCRSSQSLVHSNANTYLHWYLQKPGQSPQLLIYKVSNRFSGVPDRFSGSGSGTDFTLKISRVEAEDVGVYYCSQNTHVPPTFGQGTKLEIKRGGGGSGGGGSGGGGSQVQLVQSGAEVKKPGASVKVSCKASGYTFTDYEMHWVRQAPGQGLEWMGALDPKTGDTAYSQKFKGRVTLTADESTSTAYMELSSLRSEDTAVYYCTRFYSYTYWGQGTLVTVSSTTTPAPRPPTPAPTIASQPLSLRPEACRPAAGGAVHTRGLDFACDIYIWAPLAGTCGVLLLSLVITLYCKRGRKKLLYIFKQPFMRPVQTTQEEDGCSCRFPEEEEGGCELRVKFSRSADAPAYKQGQNQLYNELNLGRREEYDVLDKRRGRDPEMGGKPRRKNPQEGLYNELQKDKMAEAYSEIGMKGERRRGKGHDGLYQGLSTATKDTYDALHMQALPPRGSGATNFSLLKQAGDVEENPGPMALPVTALLLPLALLLHAARPSLFNQEVQIPLTESYCGPCPKNWICYKNNCYQFFDESKNWYESQASCMSQNASLLKVYSKEDQDLLKLVKSYHWMGLVHIPTNGSWQWEDGSILSPNLLTIIEMQKGDCALYASSFKGYIENCSTPNTYICMQRTVSDPTRVETATETAWISLVTALHLVLGLSAVLGLLLLRWQFPAHYRRLRHALWPSLPDLHRVLGQYLRDTAALSPPKATVSDTCEEVEPSLLEILPKSSERTPLPLARDEVEGFLQDTFPQQLEESEKQRLGGDVQSPNCPSEDVVITPESFGRDSSLTCLAGNVSACDAPILSSSRSLDCRESGKNGPHVYQDLLLSLGTTNSTLPPPFSLQSGILTLNPVAQGQPILTSLGSNQEEAYVTMSSFYQNQECDFTSPGDEGPPRSYLRQWVVIPPPLSSPGPQAS

SEQ ID NO: 58 - protein, 1061 aa, Artificial Sequence
  BM NKG2D-IL-7Ralpha-IL-21R-3 amino acid sequence
MALPVTALLLPLALLLHAARPDVVMTQSPLSLPVTPGEPASISCRSSQSLVHSNANTYLHWYLQKPGQSPQLLIYKVSNRFSGVPDRFSGSGSGTDFTLKISRVEAEDVGVYYCSQNTHVPPTFGQGTKLEIKRGGGGSGGGGSGGGGSQVQLVQSGAEVKKPGASVKVSCKASGYTFTDYEMHWVRQAPGQGLEWMGALDPKTGDTAYSQKFKGRVTLTADESTSTAYMELSSLRSEDTAVYYCTRFYSYTYWGQGTLVTVSSTTTPAPRPPTPAPTIASQPLSLRPEACRPAAGGAVHTRGLDFACDIYIWAPLAGTCGVLLLSLVITLYCKRGRKKLLYIFKQPFMRPVQTTQEEDGCSCRFPEEEEGGCELRVKFSRSADAPAYKQGQNQLYNELNLGRREEYDVLDKRRGRDPEMGGKPRRKNPQEGLYNELQKDKMAEAYSEIGMKGERRRGKGHDGLYQGLSTATKDTYDALHMQALPPRGSGATNFSLLKQAGDVEENPGPMALPVTALLLPLALLLHAARPSLFNQEVQIPLTESYCGPCPKNWICYKNNCYQFFDESKNWYESQASCMSQNASLLKVYSKEDQDLLKLVKSYHWMGLVHIPTNGSWQWEDGSILSPNLLTIIEMQKGDCALYASSFKGYIENCSTPNTYICMQRTVSDPTRVETATETAWISLVTALHLVLGLSAVLGLLLLRWQFPAHYRRLRHALWPSLPDLHRVLGQYLRDTAALSPPKATVSDTCEEVEPSLLEILPKSSERTPLPLARDEVEGFLQDTFPQQLEESEKQRLGGDVQSPNCPSEDVVITPESFGRDSSLTCLAGNVSACDAPILSSSRSLDCRESGKNGPHVYQDLLLSLGTTNSTLPPPFSLQSGILTLNPVAQGQPILTSLGSNQEEAYVTMSSFYQNQLELGPWSPEVPSTLEVYSCHPPRSPAKRLQLTELQEPAELVESDGVPKPSFWPTAQNSGGSAYSEERDRPYGLVSIDTVTVLDAEGPCTWPCSCEDDGYPALDLDAGLEPSECDFTSPGDEGPPRSYLRQWVVIPPPLSSPGPQAS

SEQ ID NO: 59 - protein, 948 aa, Artificial Sequence
  BM NKG2D-IL-7Ralpha-IL-23R-2 amino acid sequence
MALPVTALLLPLALLLHAARPDVVMTQSPLSLPVTPGEPASISCRSSQSLVHSNANTYLHWYLQKPGQSPQLLIYKVSNRFSGVPDRFSGSGSGTDFTLKISRVEAEDVGVYYCSQNTHVPPTFGQGTKLEIKRGGGGSGGGGSGGGGSQVQLVQSGAEVKKPGASVKVSCKASGYTFTDYEMHWVRQAPGQGLEWMGALDPKTGDTAYSQKFKGRVTLTADESTSTAYMELSSLRSEDTAVYYCTRFYSYTYWGQGTLVTVSSTTTPAPRPPTPAPTIASQPLSLRPEACRPAAGGAVHTRGLDFACDIYIWAPLAGTCGVLLLSLVITLYCKRGRKKLLYIFKQPFMRPVQTTQEEDGCSCRFPEEEEGGCELRVKFSRSADAPAYKQGQNQLYNELNLGRREEYDVLDKRRGRDPEMGGKPRRKNPQEGLYNELQKDKMAEAYSEIGMKGERRRGKGHDGLYQGLSTATKDTYDALHMQALPPRGSGATNFSLLKQAGDVEENPGPMALPVTALLLPLALLLHAARPSLFNQEVQIPLTESYCGPCPKNWICYKNNCYQFFDESKNWYESQASCMSQNASLLKVYSKEDQDLLKLVKSYHWMGLVHIPTNGSWQWEDGSILSPNLLTIIEMQKGDCALYASSFKGYIENCSTPNTYICMQRTVSDPTRVETATETAWISLVTALHLVLGLSAVLGLLLLRWQFPAHYRRLRHALWPSLPDLHRVLGQYLRDTAALSPPKATVSDTCEEVEPSLLEILPKSSERTPLPLARDEVEGFLQDTFPQQLEESEKQRLGGDVQSPNCPSEDVVITPESFGRDSSLTCLAGNVSACDAPILSSSRSLDCRESGKNGPHVYQDLLLSLGTTNSTLPPPFSLQSGILTLNPVAQGQPILTSLGSNQEEAYVTMSSFYQNQEFVSCLGIVNEELPSINTYFPQNILESHFNRIS

SEQ ID NO: 60 - protein, 945 aa, Artificial Sequence
  BM NKG2D-IL-7Ralpha-GM-CSFRalpha amino acid sequence
MALPVTALLLPLALLLHAARPDVVMTQSPLSLPVTPGEPASISCRSSQSLVHSNANTYLHWYLQKPGQSPQLLIYKVSNRFSGVPDRFSGSGSGTDFTLKISRVEAEDVGVYYCSQNTHVPPTFGQGTKLEIKRGGGGSGGGGSGGGGSQVQLVQSGAEVKKPGASVKVSCKASGYTFTDYEMHWVRQAPGQGLEWMGALDPKTGDTAYSQKFKGRVTLTADESTSTAYMELSSLRSEDTAVYYCTRFYSYTYWGQGTLVTVSSTTTPAPRPPTPAPTIASQPLSLRPEACRPAAGGAVHTRGLDFACDIYIWAPLAGTCGVLLLSLVITLYCKRGRKKLLYIFKQPFMRPVQTTQEEDGCSCRFPEEEEGGCELRVKFSRSADAPAYKQGQNQLYNELNLGRREEYDVLDKRRGRDPEMGGKPRRKNPQEGLYNELQKDKMAEAYSEIGMKGERRRGKGHDGLYQGLSTATKDTYDALHMQALPPRGSGATNFSLLKQAGDVEENPGPMALPVTALLLPLALLLHAARPSLFNQEVQIPLTESYCGPCPKNWICYKNNCYQFFDESKNWYESQASCMSQNASLLKVYSKEDQDLLKLVKSYHWMGLVHIPTNGSWQWEDGSILSPNLLTIIEMQKGDCALYASSFKGYIENCSTPNTYICMQRTVSDPTRVETATETAWISLVTALHLVLGLSAVLGLLLLRWQFPAHYRRLRHALWPSLPDLHRVLGQYLRDTAALSPPKATVSDTCEEVEPSLLEILPKSSERTPLPLARDEVEGFLQDTFPQQLEESEKQRLGGDVQSPNCPSEDVVITPESFGRDSSLTCLAGNVSACDAPILSSSRSLDCRESGKNGPHVYQDLLLSLGTTNSTLPPPFSLQSGILTLNPVAQGQPILTSLGSNQEEAYVTMSSFYQNQEVEDEIIWEEFTPEEGKGYREEVLTVKEIT

SEQ ID NO: 61 - protein, 1034 aa, Artificial Sequence
  BM NKG2D-IL-7Ralpha-GM-CSFRbeta-1 amino acid sequence
MALPVTALLLPLALLLHAARPDVVMTQSPLSLPVTPGEPASISCRSSQSLVHSNANTYLHWYLQKPGQSPQLLIYKVSNRFSGVPDRFSGSGSGTDFTLKISRVEAEDVGVYYCSQNTHVPPTFGQGTKLEIKRGGGGSGGGGSGGGGSQVQLVQSGAEVKKPGASVKVSCKASGYTFTDYEMHWVRQAPGQGLEWMGALDPKTGDTAYSQKFKGRVTLTADESTSTAYMELSSLRSEDTAVYYCTRFYSYTYWGQGTLVTVSSTTTPAPRPPTPAPTIASQPLSLRPEACRPAAGGAVHTRGLDFACDIYIWAPLAGTCGVLLLSLVITLYCKRGRKKLLYIFKQPFMRPVQTTQEEDGCSCRFPEEEEGGCELRVKFSRSADAPAYKQGQNQLYNELNLGRREEYDVLDKRRGRDPEMGGKPRRKNPQEGLYNELQKDKMAEAYSEIGMKGERRRGKGHDGLYQGLSTATKDTYDALHMQALPPRGSGATNFSLLKQAGDVEENPGPMALPVTALLLPLALLLHAARPSLFNQEVQIPLTESYCGPCPKNWICYKNNCYQFFDESKNWYESQASCMSQNASLLKVYSKEDQDLLKLVKSYHWMGLVHIPTNGSWQWEDGSILSPNLLTIIEMQKGDCALYASSFKGYIENCSTPNTYICMQRTVSDPTRVETATETAWISLVTALHLVLGLSAVLGLLLLRWQFPAHYRRLRHALWPSLPDLHRVLGQYLRDTAALSPPKATVSDTCEEVEPSLLEILPKSSERTPLPLARDEVEGFLQDTFPQQLEESEKQRLGGDVQSPNCPSEDVVITPESFGRDSSLTCLAGNVSACDAPILSSSRSLDCRESGKNGPHVYQDLLLSLGTTNSTLPPPFSLQSGILTLNPVAQGQPILTSLGSNQEEAYVTMSSFYQNQDTEDPGVASGYVSSADLVFTPNSGASSVSGPPGAPGPVKSGFEGYVELPPIEGRSPRSQPEGLLVLQQVGDYCFLPGLGPGPLSLRSKQVPVIQLFKALKQQDYLSLPPWEVNKPGEVC

SEQ ID NO: 62 - protein, 1098 aa, Artificial Sequence
  BM NKG2D-IL-7Ralpha-GM-CSFRbeta-2 amino acid sequence
MALPVTALLLPLALLLHAARPDVVMTQSPLSLPVTPGEPASISCRSSQSLVHSNANTYLHWYLQKPGQSPQLLIYKVSNRFSGVPDRFSGSGSGTDFTLKISRVEAEDVGVYYCSQNTHVPPTFGQGTKLEIKRGGGGSGGGGSGGGGSQVQLVQSGAEVKKPGASVKVSCKASGYTFTDYEMHWVRQAPGQGLEWMGALDPKTGDTAYSQKFKGRVTLTADESTSTAYMELSSLRSEDTAVYYCTRFYSYTYWGQGTLVTVSSTTTPAPRPPTPAPTIASQPLSLRPEACRPAAGGAVHTRGLDFACDIYIWAPLAGTCGVLLLSLVITLYCKRGRKKLLYIFKQPFMRPVQTTQEEDGCSCRFPEEEEGGCELRVKFSRSADAPAYKQGQNQLYNELNLGRREEYDVLDKRRGRDPEMGGKPRRKNPQEGLYNELQKDKMAEAYSEIGMKGERRRGKGHDGLYQGLSTATKDTYDALHMQALPPRGSGATNFSLLKQAGDVEENPGPMALPVTALLLPLALLLHAARPSLFNQEVQIPLTESYCGPCPKNWICYKNNCYQFFDESKNWYESQASCMSQNASLLKVYSKEDQDLLKLVKSYHWMGLVHIPTNGSWQWEDGSILSPNLLTIIEMQKGDCALYASSFKGYIENCSTPNTYICMQRTVSDPTRVETATETAWISLVTALHLVLGLSAVLGLLLLRWQFPAHYRRLRHALWPSLPDLHRVLGQYLRDTAALSPPKATVSDTCEEVEPSLLEILPKSSERTPLPLARDEVEGFLQDTFPQQLEESEKQRLGGDVQSPNCPSEDVVITPESFGRDSSLTCLAGNVSACDAPILSSSRSLDCRESGKNGPHVYQDLLLSLGTTNSTLPPPFSLQSGILTLNPVAQGQPILTSLGSNQEEAYVTMSSFYQNQEKQASSFDFNGPYLGPPHSRSLPDILGQPEPPQEGGSQKSPPPGSLEYLCLPAGGQVQLVPLAQDTEDPGVASGYVSSADLVFTPNSGASSVSGPPGAPGPVKSGFEGYVELPPIEGRSPRSQPEGLLVLQQVGDYCFLPGLGPGPLSLRSKQVPVIQLFKALKQQDYLSLPPWEVNKPGEVC

SEQ ID NO: 63 - protein, 861 aa, Artificial Sequence
  BM NKG2D-IL12Rbeta1-IL15Ralpha amino acid sequence
MALPVTALLLPLALLLHAARPDVVMTQSPLSLPVTPGEPASISCRSSQSLVHSNANTYLHWYLQKPGQSPQLLIYKVSNRFSGVPDRFSGSGSGTDFTLKISRVEAEDVGVYYCSQNTHVPPTFGQGTKLEIKRGGGGSGGGGSGGGGSQVQLVQSGAEVKKPGASVKVSCKASGYTFTDYEMHWVRQAPGQGLEWMGALDPKTGDTAYSQKFKGRVTLTADESTSTAYMELSSLRSEDTAVYYCTRFYSYTYWGQGTLVTVSSTTTPAPRPPTPAPTIASQPLSLRPEACRPAAGGAVHTRGLDFACDIYIWAPLAGTCGVLLLSLVITLYCKRGRKKLLYIFKQPFMRPVQTTQEEDGCSCRFPEEEEGGCELRVKFSRSADAPAYKQGQNQLYNELNLGRREEYDVLDKRRGRDPEMGGKPRRKNPQEGLYNELQKDKMAEAYSEIGMKGERRRGKGHDGLYQGLSTATKDTYDALHMQALPPRGSGATNFSLLKQAGDVEENPGPMALPVTALLLPLALLLHAARPSLFNQEVQIPLTESYCGPCPKNWICYKNNCYQFFDESKNWYESQASCMSQNASLLKVYSKEDQDLLKLVKSYHWMGLVHIPTNGSWQWEDGSILSPNLLTIIEMQKGDCALYASSFKGYIENCSTPNTYICMQRTVSDPTRVETATETAWISLVTALHLVLGLSAVLGLLLLRWQFPAHYRRLRHALWPSLPDLHRVLGQYLRDTAALSPPKATVSDTCEEVEPSLLEILPKSSERTPLPLSLQEALVVEMSWDKGERTEPLEKTELPEGAPELALDTELSLEDGDRCKAKMKSRQTPPLASVEMEAMEALPVTWGTSSRDEDLENCSHHL

SEQ ID NO: 64 - protein, 1041 aa, Artificial Sequence
  BM NKG2D-IL12Rbeta1-IL15Rbeta-1 amino acid sequence
MALPVTALLLPLALLLHAARPDVVMTQSPLSLPVTPGEPASISCRSSQSLVHSNANTYLHWYLQKPGQSPQLLIYKVSNRFSGVPDRFSGSGSGTDFTLKISRVEAEDVGVYYCSQNTHVPPTFGQGTKLEIKRGGGGSGGGGSGGGGSQVQLVQSGAEVKKPGASVKVSCKASGYTFTDYEMHWVRQAPGQGLEWMGALDPKTGDTAYSQKFKGRVTLTADESTSTAYMELSSLRSEDTAVYYCTRFYSYTYWGQGTLVTVSSTTTPAPRPPTPAPTIASQPLSLRPEACRPAAGGAVHTRGLDFACDIYIWAPLAGTCGVLLLSLVITLYCKRGRKKLLYIFKQPFMRPVQTTQEEDGCSCRFPEEEEGGCELRVKFSRSADAPAYKQGQNQLYNELNLGRREEYDVLDKRRGRDPEMGGKPRRKNPQEGLYNELQKDKMAEAYSEIGMKGERRRGKGHDGLYQGLSTATKDTYDALHMQALPPRGSGATNFSLLKQAGDVEENPGPMALPVTALLLPLALLLHAARPSLFNQEVQIPLTESYCGPCPKNWICYKNNCYQFFDESKNWYESQASCMSQNASLLKVYSKEDQDLLKLVKSYHWMGLVHIPTNGSWQWEDGSILSPNLLTIIEMQKGDCALYASSFKGYIENCSTPNTYICMQRTVSDPTRVETATETAWISLVTALHLVLGLSAVLGLLLLRWQFPAHYRRLRHALWPSLPDLHRVLGQYLRDTAALSPPKATVSDTCEEVEPSLLEILPKSSERTPLPLSLQEALVVEMSWDKGERTEPLEKTELPEGAPELALDTELSLEDGDRCKAKMVTQLLLQQDKVPEPASLSSNHSLTSCFTNQGYFFFHLPDALEIEACQVYFTYDPYSEEDPDEGVAGAPTGSSPQPLQPLSGEDDAYCTFPSRDDLLLFSPSLLGGPSPPSTAPGGSGAGEERMPPSLQERVPRDWDPQPLGPPTPGVPDLVDFQPPPELVLREAGEEVPDAGPREGVSFPWSRPPGQGEFRALNARLPLNTDAYLSLQELQGQDPTHLV

SEQ ID NO: 65 - protein, 940 aa, Artificial Sequence
  BM NKG2D-IL12Rbeta1-IL15Rbeta-2 amino acid sequence
MALPVTALLLPLALLLHAARPDVVMTQSPLSLPVTPGEPASISCRSSQSLVHSNANTYLHWYLQKPGQSPQLLIYKVSNRFSGVPDRFSGSGSGTDFTLKISRVEAEDVGVYYCSQNTHVPPTFGQGTKLEIKRGGGGSGGGGSGGGGSQVQLVQSGAEVKKPGASVKVSCKASGYTFTDYEMHWVRQAPGQGLEWMGALDPKTGDTAYSQKFKGRVTLTADESTSTAYMELSSLRSEDTAVYYCTRFYSYTYWGQGTLVTVSSTTTPAPRPPTPAPTIASQPLSLRPEACRPAAGGAVHTRGLDFACDIYIWAPLAGTCGVLLLSLVITLYCKRGRKKLLYIFKQPFMRPVQTTQEEDGCSCRFPEEEEGGCELRVKFSRSADAPAYKQGQNQLYNELNLGRREEYDVLDKRRGRDPEMGGKPRRKNPQEGLYNELQKDKMAEAYSEIGMKGERRRGKGHDGLYQGLSTATKDTYDALHMQALPPRGSGATNFSLLKQAGDVEENPGPMALPVTALLLPLALLLHAARPSLFNQEVQIPLTESYCGPCPKNWICYKNNCYQFFDESKNWYESQASCMSQNASLLKVYSKEDQDLLKLVKSYHWMGLVHIPTNGSWQWEDGSILSPNLLTIIEMQKGDCALYASSFKGYIENCSTPNTYICMQRTVSDPTRVETATETAWISLVTALHLVLGLSAVLGLLLLRWQFPAHYRRLRHALWPSLPDLHRVLGQYLRDTAALSPPKATVSDTCEEVEPSLLEILPKSSERTPLPLSLQEALVVEMSWDKGERTEPLEKTELPEGAPELALDTELSLEDGDRCKAKMEPASLSSNHSLTSCFTNQGYFFFHLPDALEIEACQVYFTYDPYSEEDPDEGVAGAPTGSSPQPLQPLSGEDDAYCTFPSRDDLLLFSEFRALNARLPLNTDAYLSLQELQGQDPTHLV

SEQ ID NO: 66 - protein, 933 aa, Artificial Sequence
  BM NKG2D-IL12Rbeta1-IL-21R-1 amino acid sequence
MALPVTALLLPLALLLHAARPDVVMTQSPLSLPVTPGEPASISCRSSQSLVHSNANTYLHWYLQKPGQSPQLLIYKVSNRFSGVPDRFSGSGSGTDFTLKISRVEAEDVGVYYCSQNTHVPPTFGQGTKLEIKRGGGGSGGGGSGGGGSQVQLVQSGAEVKKPGASVKVSCKASGYTFTDYEMHWVRQAPGQGLEWMGALDPKTGDTAYSQKFKGRVTLTADESTSTAYMELSSLRSEDTAVYYCTRFYSYTYWGQGTLVTVSSTTTPAPRPPTPAPTIASQPLSLRPEACRPAAGGAVHTRGLDFACDIYIWAPLAGTCGVLLLSLVITLYCKRGRKKLLYIFKQPFMRPVQTTQEEDGCSCRFPEEEEGGCELRVKFSRSADAPAYKQGQNQLYNELNLGRREEYDVLDKRRGRDPEMGGKPRRKNPQEGLYNELQKDKMAEAYSEIGMKGERRRGKGHDGLYQGLSTATKDTYDALHMQALPPRGSGATNFSLLKQAGDVEENPGPMALPVTALLLPLALLLHAARPSLFNQEVQIPLTESYCGPCPKNWICYKNNCYQFFDESKNWYESQASCMSQNASLLKVYSKEDQDLLKLVKSYHWMGLVHIPTNGSWQWEDGSILSPNLLTIIEMQKGDCALYASSFKGYIENCSTPNTYICMQRTVSDPTRVETATETAWISLVTALHLVLGLSAVLGLLLLRWQFPAHYRRLRHALWPSLPDLHRVLGQYLRDTAALSPPKATVSDTCEEVEPSLLEILPKSSERTPLPLSLQEALVVEMSWDKGERTEPLEKTELPEGAPELALDTELSLEDGDRCKAKMLELGPWSPEVPSTLEVYSCHPPRSPAKRLQLTELQEPAELVESDGVPKPSFWPTAQNSGGSAYSEERDRPYGLVSIDTVTVLDAEGPCTWPCSCEDDGYPALDLDAGLEPS

SEQ ID NO: 67 - protein, 857 aa, Artificial Sequence
  BM NKG2D-IL12Rbeta1-IL-21R-2 amino acid sequence
MALPVTALLLPLALLLHAARPDVVMTQSPLSLPVTPGEPASISCRSSQSLVHSNANTYLHWYLQKPGQSPQLLIYKVSNRFSGVPDRFSGSGSGTDFTLKISRVEAEDVGVYYCSQNTHVPPTFGQGTKLEIKRGGGGSGGGGSGGGGSQVQLVQSGAEVKKPGASVKVSCKASGYTFTDYEMHWVRQAPGQGLEWMGALDPKTGDTAYSQKFKGRVTLTADESTSTAYMELSSLRSEDTAVYYCTRFYSYTYWGQGTLVTVSSTTTPAPRPPTPAPTIASQPLSLRPEACRPAAGGAVHTRGLDFACDIYIWAPLAGTCGVLLLSLVITLYCKRGRKKLLYIFKQPFMRPVQTTQEEDGCSCRFPEEEEGGCELRVKFSRSADAPAYKQGQNQLYNELNLGRREEYDVLDKRRGRDPEMGGKPRRKNPQEGLYNELQKDKMAEAYSEIGMKGERRRGKGHDGLYQGLSTATKDTYDALHMQALPPRGSGATNFSLLKQAGDVEENPGPMALPVTALLLPLALLLHAARPSLFNQEVQIPLTESYCGPCPKNWICYKNNCYQFFDESKNWYESQASCMSQNASLLKVYSKEDQDLLKLVKSYHWMGLVHIPTNGSWQWEDGSILSPNLLTIIEMQKGDCALYASSFKGYIENCSTPNTYICMQRTVSDPTRVETATETAWISLVTALHLVLGLSAVLGLLLLRWQFPAHYRRLRHALWPSLPDLHRVLGQYLRDTAALSPPKATVSDTCEEVEPSLLEILPKSSERTPLPLSLQEALVVEMSWDKGERTEPLEKTELPEGAPELALDTELSLEDGDRCKAKMECDFTSPGDEGPPRSYLRQWVVIPPPLSSPGPQAS

SEQ ID NO: 68 - protein, 968 aa, Artificial Sequence
  BM NKG2D-IL12Rbeta1-IL-21R-3 amino acid sequence
MALPVTALLLPLALLLHAARPDVVMTQSPLSLPVTPGEPASISCRSSQSLVHSNANTYLHWYLQKPGQSPQLLIYKVSNRFSGVPDRFSGSGSGTDFTLKISRVEAEDVGVYYCSQNTHVPPTFGQGTKLEIKRGGGGSGGGGSGGGGSQVQLVQSGAEVKKPGASVKVSCKASGYTFTDYEMHWVRQAPGQGLEWMGALDPKTGDTAYSQKFKGRVTLTADESTSTAYMELSSLRSEDTAVYYCTRFYSYTYWGQGTLVTVSSTTTPAPRPPTPAPTIASQPLSLRPEACRPAAGGAVHTRGLDFACDIYIWAPLAGTCGVLLLSLVITLYCKRGRKKLLYIFKQPFMRPVQTTQEEDGCSCRFPEEEEGGCELRVKFSRSADAPAYKQGQNQLYNELNLGRREEYDVLDKRRGRDPEMGGKPRRKNPQEGLYNELQKDKMAEAYSEIGMKGERRRGKGHDGLYQGLSTATKDTYDALHMQALPPRGSGATNFSLLKQAGDVEENPGPMALPVTALLLPLALLLHAARPSLFNQEVQIPLTESYCGPCPKNWICYKNNCYQFFDESKNWYESQASCMSQNASLLKVYSKEDQDLLKLVKSYHWMGLVHIPTNGSWQWEDGSILSPNLLTIIEMQKGDCALYASSFKGYIENCSTPNTYICMQRTVSDPTRVETATETAWISLVTALHLVLGLSAVLGLLLLRWQFPAHYRRLRHALWPSLPDLHRVLGQYLRDTAALSPPKATVSDTCEEVEPSLLEILPKSSERTPLPLSLQEALVVEMSWDKGERTEPLEKTELPEGAPELALDTELSLEDGDRCKAKMLELGPWSPEVPSTLEVYSCHPPRSPAKRLQLTELQEPAELVESDGVPKPSFWPTAQNSGGSAYSEERDRPYGLVSIDTVTVLDAEGPCTWPCSCEDDGYPALDLDAGLEPSECDFTSPGDEGPPRSYLRQWVVIPPPLSSPGPQAS

SEQ ID NO: 69 - protein, 855 aa, Artificial Sequence
  BM NKG2D-IL12Rbeta1-IL-23R-2 amino acid sequence
MALPVTALLLPLALLLHAARPDVVMTQSPLSLPVTPGEPASISCRSSQSLVHSNANTYLHWYLQKPGQSPQLLIYKVSNRFSGVPDRFSGSGSGTDFTLKISRVEAEDVGVYYCSQNTHVPPTFGQGTKLEIKRGGGGSGGGGSGGGGSQVQLVQSGAEVKKPGASVKVSCKASGYTFTDYEMHWVRQAPGQGLEWMGALDPKTGDTAYSQKFKGRVTLTADESTSTAYMELSSLRSEDTAVYYCTRFYSYTYWGQGTLVTVSSTTTPAPRPPTPAPTIASQPLSLRPEACRPAAGGAVHTRGLDFACDIYIWAPLAGTCGVLLLSLVITLYCKRGRKKLLYIFKQPFMRPVQTTQEEDGCSCRFPEEEEGGCELRVKFSRSADAPAYKQGQNQLYNELNLGRREEYDVLDKRRGRDPEMGGKPRRKNPQEGLYNELQKDKMAEAYSEIGMKGERRRGKGHDGLYQGLSTATKDTYDALHMQALPPRGSGATNFSLLKQAGDVEENPGPMALPVTALLLPLALLLHAARPSLFNQEVQIPLTESYCGPCPKNWICYKNNCYQFFDESKNWYESQASCMSQNASLLKVYSKEDQDLLKLVKSYHWMGLVHIPTNGSWQWEDGSILSPNLLTIIEMQKGDCALYASSFKGYIENCSTPNTYICMQRTVSDPTRVETATETAWISLVTALHLVLGLSAVLGLLLLRWQFPAHYRRLRHALWPSLPDLHRVLGQYLRDTAALSPPKATVSDTCEEVEPSLLEILPKSSERTPLPLSLQEALVVEMSWDKGERTEPLEKTELPEGAPELALDTELSLEDGDRCKAKMEFVSCLGIVNEELPSINTYFPQNILESHFNRIS

SEQ ID NO: 70 - protein, 852 aa, Artificial Sequence
  BM NKG2D-IL12Rbeta1-GM-CSFRalpha amino acid sequence
MALPVTALLLPLALLLHAARPDVVMTQSPLSLPVTPGEPASISCRSSQSLVHSNANTYLHWYLQKPGQSPQLLIYKVSNRFSGVPDRFSGSGSGTDFTLKISRVEAEDVGVYYCSQNTHVPPTFGQGTKLEIKRGGGGSGGGGSGGGGSQVQLVQSGAEVKKPGASVKVSCKASGYTFTDYEMHWVRQAPGQGLEWMGALDPKTGDTAYSQKFKGRVTLTADESTSTAYMELSSLRSEDTAVYYCTRFYSYTYWGQGTLVTVSSTTTPAPRPPTPAPTIASQPLSLRPEACRPAAGGAVHTRGLDFACDIYIWAPLAGTCGVLLLSLVITLYCKRGRKKLLYIFKQPFMRPVQTTQEEDGCSCRFPEEEEGGCELRVKFSRSADAPAYKQGQNQLYNELNLGRREEYDVLDKRRGRDPEMGGKPRRKNPQEGLYNELQKDKMAEAYSEIGMKGERRRGKGHDGLYQGLSTATKDTYDALHMQALPPRGSGATNFSLLKQAGDVEENPGPMALPVTALLLPLALLLHAARPSLFNQEVQIPLTESYCGPCPKNWICYKNNCYQFFDESKNWYESQASCMSQNASLLKVYSKEDQDLLKLVKSYHWMGLVHIPTNGSWQWEDGSILSPNLLTIIEMQKGDCALYASSFKGYIENCSTPNTYICMQRTVSDPTRVETATETAWISLVTALHLVLGLSAVLGLLLLRWQFPAHYRRLRHALWPSLPDLHRVLGQYLRDTAALSPPKATVSDTCEEVEPSLLEILPKSSERTPLPLSLQEALVVEMSWDKGERTEPLEKTELPEGAPELALDTELSLEDGDRCKAKMEVEDEIIWEEFTPEEGKGYREEVLTVKEIT

SEQ ID NO: 71 - protein, 941 aa, Artificial Sequence
  BM NKG2D-IL12Rbeta1-GM-CSFRbeta-1 amino acid sequence
MALPVTALLLPLALLLHAARPDVVMTQSPLSLPVTPGEPASISCRSSQSLVHSNANTYLHWYLQKPGQSPQLLIYKVSNRFSGVPDRFSGSGSGTDFTLKISRVEAEDVGVYYCSQNTHVPPTFGQGTKLEIKRGGGGSGGGGSGGGGSQVQLVQSGAEVKKPGASVKVSCKASGYTFTDYEMHWVRQAPGQGLEWMGALDPKTGDTAYSQKFKGRVTLTADESTSTAYMELSSLRSEDTAVYYCTRFYSYTYWGQGTLVTVSSTTTPAPRPPTPAPTIASQPLSLRPEACRPAAGGAVHTRGLDFACDIYIWAPLAGTCGVLLLSLVITLYCKRGRKKLLYIFKQPFMRPVQTTQEEDGCSCRFPEEEEGGCELRVKFSRSADAPAYKQGQNQLYNELNLGRREEYDVLDKRRGRDPEMGGKPRRKNPQEGLYNELQKDKMAEAYSEIGMKGERRRGKGHDGLYQGLSTATKDTYDALHMQALPPRGSGATNFSLLKQAGDVEENPGPMALPVTALLLPLALLLHAARPSLFNQEVQIPLTESYCGPCPKNWICYKNNCYQFFDESKNWYESQASCMSQNASLLKVYSKEDQDLLKLVKSYHWMGLVHIPTNGSWQWEDGSILSPNLLTIIEMQKGDCALYASSFKGYIENCSTPNTYICMQRTVSDPTRVETATETAWISLVTALHLVLGLSAVLGLLLLRWQFPAHYRRLRHALWPSLPDLHRVLGQYLRDTAALSPPKATVSDTCEEVEPSLLEILPKSSERTPLPLSLQEALVVEMSWDKGERTEPLEKTELPEGAPELALDTELSLEDGDRCKAKMDTEDPGVASGYVSSADLVFTPNSGASSVSGPPGAPGPVKSGFEGYVELPPIEGRSPRSQPEGLLVLQQVGDYCFLPGLGPGPLSLRSKQVPVIQLFKALKQQDYLSLPPWEVNKPGEVC

SEQ ID NO: 72 - protein, 1005 aa, Artificial Sequence
  BM NKG2D-IL12Rbeta1-GM-CSFRbeta-2 amino acid sequence
MALPVTALLLPLALLLHAARPDVVMTQSPLSLPVTPGEPASISCRSSQSLVHSNANTYLHWYLQKPGQSPQLLIYKVSNRFSGVPDRFSGSGSGTDFTLKISRVEAEDVGVYYCSQNTHVPPTFGQGTKLEIKRGGGGSGGGGSGGGGSQVQLVQSGAEVKKPGASVKVSCKASGYTFTDYEMHWVRQAPGQGLEWMGALDPKTGDTAYSQKFKGRVTLTADESTSTAYMELSSLRSEDTAVYYCTRFYSYTYWGQGTLVTVSSTTTPAPRPPTPAPTIASQPLSLRPEACRPAAGGAVHTRGLDFACDIYIWAPLAGTCGVLLLSLVITLYCKRGRKKLLYIFKQPFMRPVQTTQEEDGCSCRFPEEEEGGCELRVKFSRSADAPAYKQGQNQLYNELNLGRREEYDVLDKRRGRDPEMGGKPRRKNPQEGLYNELQKDKMAEAYSEIGMKGERRRGKGHDGLYQGLSTATKDTYDALHMQALPPRGSGATNFSLLKQAGDVEENPGPMALPVTALLLPLALLLHAARPSLFNQEVQIPLTESYCGPCPKNWICYKNNCYQFFDESKNWYESQASCMSQNASLLKVYSKEDQDLLKLVKSYHWMGLVHIPTNGSWQWEDGSILSPNLLTIIEMQKGDCALYASSFKGYIENCSTPNTYICMQRTVSDPTRVETATETAWISLVTALHLVLGLSAVLGLLLLRWQFPAHYRRLRHALWPSLPDLHRVLGQYLRDTAALSPPKATVSDTCEEVEPSLLEILPKSSERTPLPLSLQEALVVEMSWDKGERTEPLEKTELPEGAPELALDTELSLEDGDRCKAKMEKQASSFDFNGPYLGPPHSRSLPDILGQPEPPQEGGSQKSPPPGSLEYLCLPAGGQVQLVPLAQDTEDPGVASGYVSSADLVFTPNSGASSVSGPPGAPGPVKSGFEGYVELPPIEGRSPRSQPEGLLVLQQVGDYCFLPGLGPGPLSLRSKQVPVIQLFKALKQQDYLSLPPWEVNKPGEVC

SEQ ID NO: 73 - protein, 861 aa, Artificial Sequence
  BM NKG2D-IL12Rbeta2-IL15Ralpha amino acid sequence
MALPVTALLLPLALLLHAARPDVVMTQSPLSLPVTPGEPASISCRSSQSLVHSNANTYLHWYLQKPGQSPQLLIYKVSNRFSGVPDRFSGSGSGTDFTLKISRVEAEDVGVYYCSQNTHVPPTFGQGTKLEIKRGGGGSGGGGSGGGGSQVQLVQSGAEVKKPGASVKVSCKASGYTFTDYEMHWVRQAPGQGLEWMGALDPKTGDTAYSQKFKGRVTLTADESTSTAYMELSSLRSEDTAVYYCTRFYSYTYWGQGTLVTVSSTTTPAPRPPTPAPTIASQPLSLRPEACRPAAGGAVHTRGLDFACDIYIWAPLAGTCGVLLLSLVITLYCKRGRKKLLYIFKQPFMRPVQTTQEEDGCSCRFPEEEEGGCELRVKFSRSADAPAYKQGQNQLYNELNLGRREEYDVLDKRRGRDPEMGGKPRRKNPQEGLYNELQKDKMAEAYSEIGMKGERRRGKGHDGLYQGLSTATKDTYDALHMQALPPRGSGATNFSLLKQAGDVEENPGPMALPVTALLLPLALLLHAARPSLFNQEVQIPLTESYCGPCPKNWICYKNNCYQFFDESKNWYESQASCMSQNASLLKVYSKEDQDLLKLVKSYHWMGLVHIPTNGSWQWEDGSILSPNLLTIIEMQKGDCALYASSFKGYIENCSTPNTYICMQRTVSDPTRVETATETAWISLVTALHLVLGLSAVLGLLLLRWQFPAHYRRLRHALWPSLPDLHRVLGQYLRDTAALSPPKATVSDTCEEVEPSLLEILPKSSERTPLPLSDPKPENPACPWTVLPAGDLPTHDGYLPSNIDDLPSHEAPLADSLEELEPQKSRQTPPLASVEMEAMEALPVTWGTSSRDEDLENCSHHL

SEQ ID NO: 74 - protein, 1041 aa, Artificial Sequence
  BM NKG2D-IL12Rbeta2-IL15Rbeta-1 amino acid sequence
MALPVTALLLPLALLLHAARPDVVMTQSPLSLPVTPGEPASISCRSSQSLVHSNANTYLHWYLQKPGQSPQLLIYKVSNRFSGVPDRFSGSGSGTDFTLKISRVEAEDVGVYYCSQNTHVPPTFGQGTKLEIKRGGGGSGGGGSGGGGSQVQLVQSGAEVKKPGASVKVSCKASGYTFTDYEMHWVRQAPGQGLEWMGALDPKTGDTAYSQKFKGRVTLTADESTSTAYMELSSLRSEDTAVYYCTRFYSYTYWGQGTLVTVSSTTTPAPRPPTPAPTIASQPLSLRPEACRPAAGGAVHTRGLDFACDIYIWAPLAGTCGVLLLSLVITLYCKRGRKKLLYIFKQPFMRPVQTTQEEDGCSCRFPEEEEGGCELRVKFSRSADAPAYKQGQNQLYNELNLGRREEYDVLDKRRGRDPEMGGKPRRKNPQEGLYNELQKDKMAEAYSEIGMKGERRRGKGHDGLYQGLSTATKDTYDALHMQALPPRGSGATNFSLLKQAGDVEENPGPMALPVTALLLPLALLLHAARPSLFNQEVQIPLTESYCGPCPKNWICYKNNCYQFFDESKNWYESQASCMSQNASLLKVYSKEDQDLLKLVKSYHWMGLVHIPTNGSWQWEDGSILSPNLLTIIEMQKGDCALYASSFKGYIENCSTPNTYICMQRTVSDPTRVETATETAWISLVTALHLVLGLSAVLGLLLLRWQFPAHYRRLRHALWPSLPDLHRVLGQYLRDTAALSPPKATVSDTCEEVEPSLLEILPKSSERTPLPLSDPKPENPACPWTVLPAGDLPTHDGYLPSNIDDLPSHEAPLADSLEELEPQVTQLLLQQDKVPEPASLSSNHSLTSCFTNQGYFFFHLPDALEIEACQVYFTYDPYSEEDPDEGVAGAPTGSSPQPLQPLSGEDDAYCTFPSRDDLLLFSPSLLGGPSPPSTAPGGSGAGEERMPPSLQERVPRDWDPQPLGPPTPGVPDLVDFQPPPELVLREAGEEVPDAGPREGVSFPWSRPPGQGEFRALNARLPLNTDAYLSLQELQGQDPTHLV

SEQ ID NO: 75 - protein, 940 aa, Artificial Sequence
  BM NKG2D-IL12Rbeta2-IL15Rbeta-2 amino acid sequence
MALPVTALLLPLALLLHAARPDVVMTQSPLSLPVTPGEPASISCRSSQSLVHSNANTYLHWYLQKPGQSPQLLIYKVSNRFSGVPDRFSGSGSGTDFTLKISRVEAEDVGVYYCSQNTHVPPTFGQGTKLEIKRGGGGSGGGGSGGGGSQVQLVQSGAEVKKPGASVKVSCKASGYTFTDYEMHWVRQAPGQGLEWMGALDPKTGDTAYSQKFKGRVTLTADESTSTAYMELSSLRSEDTAVYYCTRFYSYTYWGQGTLVTVSSTTTPAPRPPTPAPTIASQPLSLRPEACRPAAGGAVHTRGLDFACDIYIWAPLAGTCGVLLLSLVITLYCKRGRKKLLYIFKQPFMRPVQTTQEEDGCSCRFPEEEEGGCELRVKFSRSADAPAYKQGQNQLYNELNLGRREEYDVLDKRRGRDPEMGGKPRRKNPQEGLYNELQKDKMAEAYSEIGMKGERRRGKGHDGLYQGLSTATKDTYDALHMQALPPRGSGATNFSLLKQAGDVEENPGPMALPVTALLLPLALLLHAARPSLFNQEVQIPLTESYCGPCPKNWICYKNNCYQFFDESKNWYESQASCMSQNASLLKVYSKEDQDLLKLVKSYHWMGLVHIPTNGSWQWEDGSILSPNLLTIIEMQKGDCALYASSFKGYIENCSTPNTYICMQRTVSDPTRVETATETAWISLVTALHLVLGLSAVLGLLLLRWQFPAHYRRLRHALWPSLPDLHRVLGQYLRDTAALSPPKATVSDTCEEVEPSLLEILPKSSERTPLPLSDPKPENPACPWTVLPAGDLPTHDGYLPSNIDDLPSHEAPLADSLEELEPQEPASLSSNHSLTSCFTNQGYFFFHLPDALEIEACQVYFTYDPYSEEDPDEGVAGAPTGSSPQPLQPLSGEDDAYCTFPSRDDLLLFSEFRALNARLPLNTDAYLSLQELQGQDPTHLV

SEQ ID NO: 76 - protein, 933 aa, Artificial Sequence
  BM NKG2D-IL12Rbeta2-IL-21R-1 amino acid sequence
MALPVTALLLPLALLLHAARPDVVMTQSPLSLPVTPGEPASISCRSSQSLVHSNANTYLHWYLQKPGQSPQLLIYKVSNRFSGVPDRFSGSGSGTDFTLKISRVEAEDVGVYYCSQNTHVPPTFGQGTKLEIKRGGGGSGGGGSGGGGSQVQLVQSGAEVKKPGASVKVSCKASGYTFTDYEMHWVRQAPGQGLEWMGALDPKTGDTAYSQKFKGRVTLTADESTSTAYMELSSLRSEDTAVYYCTRFYSYTYWGQGTLVTVSSTTTPAPRPPTPAPTIASQPLSLRPEACRPAAGGAVHTRGLDFACDIYIWAPLAGTCGVLLLSLVITLYCKRGRKKLLYIFKQPFMRPVQTTQEEDGCSCRFPEEEEGGCELRVKFSRSADAPAYKQGQNQLYNELNLGRREEYDVLDKRRGRDPEMGGKPRRKNPQEGLYNELQKDKMAEAYSEIGMKGERRRGKGHDGLYQGLSTATKDTYDALHMQALPPRGSGATNFSLLKQAGDVEENPGPMALPVTALLLPLALLLHAARPSLFNQEVQIPLTESYCGPCPKNWICYKNNCYQFFDESKNWYESQASCMSQNASLLKVYSKEDQDLLKLVKSYHWMGLVHIPTNGSWQWEDGSILSPNLLTIIEMQKGDCALYASSFKGYIENCSTPNTYICMQRTVSDPTRVETATETAWISLVTALHLVLGLSAVLGLLLLRWQFPAHYRRLRHALWPSLPDLHRVLGQYLRDTAALSPPKATVSDTCEEVEPSLLEILPKSSERTPLPLSDPKPENPACPWTVLPAGDLPTHDGYLPSNIDDLPSHEAPLADSLEELEPQLELGPWSPEVPSTLEVYSCHPPRSPAKRLQLTELQEPAELVESDGVPKPSFWPTAQNSGGSAYSEERDRPYGLVSIDTVTVLDAEGPCTWPCSCEDDGYPALDLDAGLEPS

SEQ ID NO: 77 - protein, 857 aa, Artificial Sequence
  BM NKG2D-IL12Rbeta2-IL-21R-2 amino acid sequence
MALPVTALLLPLALLLHAARPDVVMTQSPLSLPVTPGEPASISCRSSQSLVHSNANTYLHWYLQKPGQSPQLLIYKVSNRFSGVPDRFSGSGSGTDFTLKISRVEAEDVGVYYCSQNTHVPPTFGQGTKLEIKRGGGGSGGGGSGGGGSQVQLVQSGAEVKKPGASVKVSCKASGYTFTDYEMHWVRQAPGQGLEWMGALDPKTGDTAYSQKFKGRVTLTADESTSTAYMELSSLRSEDTAVYYCTRFYSYTYWGQGTLVTVSSTTTPAPRPPTPAPTIASQPLSLRPEACRPAAGGAVHTRGLDFACDIYIWAPLAGTCGVLLLSLVITLYCKRGRKKLLYIFKQPFMRPVQTTQEEDGCSCRFPEEEEGGCELRVKFSRSADAPAYKQGQNQLYNELNLGRREEYDVLDKRRGRDPEMGGKPRRKNPQEGLYNELQKDKMAEAYSEIGMKGERRRGKGHDGLYQGLSTATKDTYDALHMQALPPRGSGATNFSLLKQAGDVEENPGPMALPVTALLLPLALLLHAARPSLFNQEVQIPLTESYCGPCPKNWICYKNNCYQFFDESKNWYESQASCMSQNASLLKVYSKEDQDLLKLVKSYHWMGLVHIPTNGSWQWEDGSILSPNLLTIIEMQKGDCALYASSFKGYIENCSTPNTYICMQRTVSDPTRVETATETAWISLVTALHLVLGLSAVLGLLLLRWQFPAHYRRLRHALWPSLPDLHRVLGQYLRDTAALSPPKATVSDTCEEVEPSLLEILPKSSERTPLPLSDPKPENPACPWTVLPAGDLPTHDGYLPSNIDDLPSHEAPLADSLEELEPQECDFTSPGDEGPPRSYLRQWVVIPPPLSSPGPQAS

SEQ ID NO: 78 - protein, 968 aa, Artificial Sequence
  BM NKG2D-IL12Rbeta2-IL-21R-3 amino acid sequence
MALPVTALLLPLALLLHAARPDVVMTQSPLSLPVTPGEPASISCRSSQSLVHSNANTYLHWYLQKPGQSPQLLIYKVSNRFSGVPDRFSGSGSGTDFTLKISRVEAEDVGVYYCSQNTHVPPTFGQGTKLEIKRGGGGSGGGGSGGGGSQVQLVQSGAEVKKPGASVKVSCKASGYTFTDYEMHWVRQAPGQGLEWMGALDPKTGDTAYSQKFKGRVTLTADESTSTAYMELSSLRSEDTAVYYCTRFYSYTYWGQGTLVTVSSTTTPAPRPPTPAPTIASQPLSLRPEACRPAAGGAVHTRGLDFACDIYIWAPLAGTCGVLLLSLVITLYCKRGRKKLLYIFKQPFMRPVQTTQEEDGCSCRFPEEEEGGCELRVKFSRSADAPAYKQGQNQLYNELNLGRREEYDVLDKRRGRDPEMGGKPRRKNPQEGLYNELQKDKMAEAYSEIGMKGERRRGKGHDGLYQGLSTATKDTYDALHMQALPPRGSGATNFSLLKQAGDVEENPGPMALPVTALLLPLALLLHAARPSLFNQEVQIPLTESYCGPCPKNWICYKNNCYQFFDESKNWYESQASCMSQNASLLKVYSKEDQDLLKLVKSYHWMGLVHIPTNGSWQWEDGSILSPNLLTIIEMQKGDCALYASSFKGYIENCSTPNTYICMQRTVSDPTRVETATETAWISLVTALHLVLGLSAVLGLLLLRWQFPAHYRRLRHALWPSLPDLHRVLGQYLRDTAALSPPKATVSDTCEEVEPSLLEILPKSSERTPLPLSDPKPENPACPWTVLPAGDLPTHDGYLPSNIDDLPSHEAPLADSLEELEPQLELGPWSPEVPSTLEVYSCHPPRSPAKRLQLTELQEPAELVESDGVPKPSFWPTAQNSGGSAYSEERDRPYGLVSIDTVTVLDAEGPCTWPCSCEDDGYPALDLDAGLEPSECDFTSPGDEGPPRSYLRQWVVIPPPLSSPGPQAS

SEQ ID NO: 79 - protein, 855 aa, Artificial Sequence
  BM NKG2D-IL12Rbeta2-IL-23R-2 amino acid sequence
MALPVTALLLPLALLLHAARPDVVMTQSPLSLPVTPGEPASISCRSSQSLVHSNANTYLHWYLQKPGQSPQLLIYKVSNRFSGVPDRFSGSGSGTDFTLKISRVEAEDVGVYYCSQNTHVPPTFGQGTKLEIKRGGGGSGGGGSGGGGSQVQLVQSGAEVKKPGASVKVSCKASGYTFTDYEMHWVRQAPGQGLEWMGALDPKTGDTAYSQKFKGRVTLTADESTSTAYMELSSLRSEDTAVYYCTRFYSYTYWGQGTLVTVSSTTTPAPRPPTPAPTIASQPLSLRPEACRPAAGGAVHTRGLDFACDIYIWAPLAGTCGVLLLSLVITLYCKRGRKKLLYIFKQPFMRPVQTTQEEDGCSCRFPEEEEGGCELRVKFSRSADAPAYKQGQNQLYNELNLGRREEYDVLDKRRGRDPEMGGKPRRKNPQEGLYNELQKDKMAEAYSEIGMKGERRRGKGHDGLYQGLSTATKDTYDALHMQALPPRGSGATNFSLLKQAGDVEENPGPMALPVTALLLPLALLLHAARPSLFNQEVQIPLTESYCGPCPKNWICYKNNCYQFFDESKNWYESQASCMSQNASLLKVYSKEDQDLLKLVKSYHWMGLVHIPTNGSWQWEDGSILSPNLLTIIEMQKGDCALYASSFKGYIENCSTPNTYICMQRTVSDPTRVETATETAWISLVTALHLVLGLSAVLGLLLLRWQFPAHYRRLRHALWPSLPDLHRVLGQYLRDTAALSPPKATVSDTCEEVEPSLLEILPKSSERTPLPLSDPKPENPACPWTVLPAGDLPTHDGYLPSNIDDLPSHEAPLADSLEELEPQEFVSCLGIVNEELPSINTYFPQNILESHFNRIS

SEQ ID NO: 80 - protein, 852 aa, Artificial Sequence
  BM NKG2D-IL12Rbeta2-GM-CSFRalpha amino acid sequence
MALPVTALLLPLALLLHAARPDVVMTQSPLSLPVTPGEPASISCRSSQSLVHSNANTYLHWYLQKPGQSPQLLIYKVSNRFSGVPDRFSGSGSGTDFTLKISRVEAEDVGVYYCSQNTHVPPTFGQGTKLEIKRGGGGSGGGGSGGGGSQVQLVQSGAEVKKPGASVKVSCKASGYTFTDYEMHWVRQAPGQGLEWMGALDPKTGDTAYSQKFKGRVTLTADESTSTAYMELSSLRSEDTAVYYCTRFYSYTYWGQGTLVTVSSTTTPAPRPPTPAPTIASQPLSLRPEACRPAAGGAVHTRGLDFACDIYIWAPLAGTCGVLLLSLVITLYCKRGRKKLLYIFKQPFMRPVQTTQEEDGCSCRFPEEEEGGCELRVKFSRSADAPAYKQGQNQLYNELNLGRREEYDVLDKRRGRDPEMGGKPRRKNPQEGLYNELQKDKMAEAYSEIGMKGERRRGKGHDGLYQGLSTATKDTYDALHMQALPPRGSGATNFSLLKQAGDVEENPGPMALPVTALLLPLALLLHAARPSLFNQEVQIPLTESYCGPCPKNWICYKNNCYQFFDESKNWYESQASCMSQNASLLKVYSKEDQDLLKLVKSYHWMGLVHIPTNGSWQWEDGSILSPNLLTIIEMQKGDCALYASSFKGYIENCSTPNTYICMQRTVSDPTRVETATETAWISLVTALHLVLGLSAVLGLLLLRWQFPAHYRRLRHALWPSLPDLHRVLGQYLRDTAALSPPKATVSDTCEEVEPSLLEILPKSSERTPLPLSDPKPENPACPWTVLPAGDLPTHDGYLPSNIDDLPSHEAPLADSLEELEPQEVEDEIIWEEFTPEEGKGYREEVLTVKEIT

SEQ ID NO: 81 - protein, 941 aa, Artificial Sequence
  BM NKG2D-IL12Rbeta2-GM-CSFRbeta-1 amino acid sequence
MALPVTALLLPLALLLHAARPDVVMTQSPLSLPVTPGEPASISCRSSQSLVHSNANTYLHWYLQKPGQSPQLLIYKVSNRFSGVPDRFSGSGSGTDFTLKISRVEAEDVGVYYCSQNTHVPPTFGQGTKLEIKRGGGGSGGGGSGGGGSQVQLVQSGAEVKKPGASVKVSCKASGYTFTDYEMHWVRQAPGQGLEWMGALDPKTGDTAYSQKFKGRVTLTADESTSTAYMELSSLRSEDTAVYYCTRFYSYTYWGQGTLVTVSSTTTPAPRPPTPAPTIASQPLSLRPEACRPAAGGAVHTRGLDFACDIYIWAPLAGTCGVLLLSLVITLYCKRGRKKLLYIFKQPFMRPVQTTQEEDGCSCRFPEEEEGGCELRVKFSRSADAPAYKQGQNQLYNELNLGRREEYDVLDKRRGRDPEMGGKPRRKNPQEGLYNELQKDKMAEAYSEIGMKGERRRGKGHDGLYQGLSTATKDTYDALHMQALPPRGSGATNFSLLKQAGDVEENPGPMALPVTALLLPLALLLHAARPSLFNQEVQIPLTESYCGPCPKNWICYKNNCYQFFDESKNWYESQASCMSQNASLLKVYSKEDQDLLKLVKSYHWMGLVHIPTNGSWQWEDGSILSPNLLTIIEMQKGDCALYASSFKGYIENCSTPNTYICMQRTVSDPTRVETATETAWISLVTALHLVLGLSAVLGLLLLRWQFPAHYRRLRHALWPSLPDLHRVLGQYLRDTAALSPPKATVSDTCEEVEPSLLEILPKSSERTPLPLSDPKPENPACPWTVLPAGDLPTHDGYLPSNIDDLPSHEAPLADSLEELEPQDTEDPGVASGYVSSADLVFTPNSGASSVSGPPGAPGPVKSGFEGYVELPPIEGRSPRSQPEGLLVLQQVGDYCFLPGLGPGPLSLRSKQVPVIQLFKALKQQDYLSLPPWEVNKPGEVC

SEQ ID NO: 82 - protein, 1005 aa, Artificial Sequence
  BM NKG2D-IL12Rbeta2-GM-CSFRbeta-2 amino acid sequence
MALPVTALLLPLALLLHAARPDVVMTQSPLSLPVTPGEPASISCRSSQSLVHSNANTYLHWYLQKPGQSPQLLIYKVSNRFSGVPDRFSGSGSGTDFTLKISRVEAEDVGVYYCSQNTHVPPTFGQGTKLEIKRGGGGSGGGGSGGGGSQVQLVQSGAEVKKPGASVKVSCKASGYTFTDYEMHWVRQAPGQGLEWMGALDPKTGDTAYSQKFKGRVTLTADESTSTAYMELSSLRSEDTAVYYCTRFYSYTYWGQGTLVTVSSTTTPAPRPPTPAPTIASQPLSLRPEACRPAAGGAVHTRGLDFACDIYIWAPLAGTCGVLLLSLVITLYCKRGRKKLLYIFKQPFMRPVQTTQEEDGCSCRFPEEEEGGCELRVKFSRSADAPAYKQGQNQLYNELNLGRREEYDVLDKRRGRDPEMGGKPRRKNPQEGLYNELQKDKMAEAYSEIGMKGERRRGKGHDGLYQGLSTATKDTYDALHMQALPPRGSGATNFSLLKQAGDVEENPGPMALPVTALLLPLALLLHAARPSLFNQEVQIPLTESYCGPCPKNWICYKNNCYQFFDESKNWYESQASCMSQNASLLKVYSKEDQDLLKLVKSYHWMGLVHIPTNGSWQWEDGSILSPNLLTIIEMQKGDCALYASSFKGYIENCSTPNTYICMQRTVSDPTRVETATETAWISLVTALHLVLGLSAVLGLLLLRWQFPAHYRRLRHALWPSLPDLHRVLGQYLRDTAALSPPKATVSDTCEEVEPSLLEILPKSSERTPLPLSDPKPENPACPWTVLPAGDLPTHDGYLPSNIDDLPSHEAPLADSLEELEPQEKQASSFDFNGPYLGPPHSRSLPDILGQPEPPQEGGSQKSPPPGSLEYLCLPAGGQVQLVPLAQDTEDPGVASGYVSSADLVFTPNSGASSVSGPPGAPGPVKSGFEGYVELPPIEGRSPRSQPEGLLVLQQVGDYCFLPGLGPGPLSLRSKQVPVIQLFKALKQQDYLSLPPWEVNKPGEVC

SEQ ID NO: 83 - protein, 921 aa, Artificial Sequence
  BM NKG2D-IL15Ralpha-IL-21R-1 amino acid sequence
MALPVTALLLPLALLLHAARPDVVMTQSPLSLPVTPGEPASISCRSSQSLVHSNANTYLHWYLQKPGQSPQLLIYKVSNRFSGVPDRFSGSGSGTDFTLKISRVEAEDVGVYYCSQNTHVPPTFGQGTKLEIKRGGGGSGGGGSGGGGSQVQLVQSGAEVKKPGASVKVSCKASGYTFTDYEMHWVRQAPGQGLEWMGALDPKTGDTAYSQKFKGRVTLTADESTSTAYMELSSLRSEDTAVYYCTRFYSYTYWGQGTLVTVSSTTTPAPRPPTPAPTIASQPLSLRPEACRPAAGGAVHTRGLDFACDIYIWAPLAGTCGVLLLSLVITLYCKRGRKKLLYIFKQPFMRPVQTTQEEDGCSCRFPEEEEGGCELRVKFSRSADAPAYKQGQNQLYNELNLGRREEYDVLDKRRGRDPEMGGKPRRKNPQEGLYNELQKDKMAEAYSEIGMKGERRRGKGHDGLYQGLSTATKDTYDALHMQALPPRGSGATNFSLLKQAGDVEENPGPMALPVTALLLPLALLLHAARPSLFNQEVQIPLTESYCGPCPKNWICYKNNCYQFFDESKNWYESQASCMSQNASLLKVYSKEDQDLLKLVKSYHWMGLVHIPTNGSWQWEDGSILSPNLLTIIEMQKGDCALYASSFKGYIENCSTPNTYICMQRTVSDPTRVETATETAWISLVTALHLVLGLSAVLGLLLLRWQFPAHYRRLRHALWPSLPDLHRVLGQYLRDTAALSPPKATVSDTCEEVEPSLLEILPKSSERTPLPLKSRQTPPLASVEMEAMEALPVTWGTSSRDEDLENCSHHLLELGPWSPEVPSTLEVYSCHPPRSPAKRLQLTELQEPAELVESDGVPKPSFWPTAQNSGGSAYSEERDRPYGLVSIDTVTVLDAEGPCTWPCSCEDDGYPALDLDAGLEPS

SEQ ID NO: 84 - protein, 845 aa, Artificial Sequence
  BM NKG2D-IL15Ralpha-IL-21R-2 amino acid sequence
MALPVTALLLPLALLLHAARPDVVMTQSPLSLPVTPGEPASISCRSSQSLVHSNANTYLHWYLQKPGQSPQLLIYKVSNRFSGVPDRFSGSGSGTDFTLKISRVEAEDVGVYYCSQNTHVPPTFGQGTKLEIKRGGGGSGGGGSGGGGSQVQLVQSGAEVKKPGASVKVSCKASGYTFTDYEMHWVRQAPGQGLEWMGALDPKTGDTAYSQKFKGRVTLTADESTSTAYMELSSLRSEDTAVYYCTRFYSYTYWGQGTLVTVSSTTTPAPRPPTPAPTIASQPLSLRPEACRPAAGGAVHTRGLDFACDIYIWAPLAGTCGVLLLSLVITLYCKRGRKKLLYIFKQPFMRPVQTTQEEDGCSCRFPEEEEGGCELRVKFSRSADAPAYKQGQNQLYNELNLGRREEYDVLDKRRGRDPEMGGKPRRKNPQEGLYNELQKDKMAEAYSEIGMKGERRRGKGHDGLYQGLSTATKDTYDALHMQALPPRGSGATNFSLLKQAGDVEENPGPMALPVTALLLPLALLLHAARPSLFNQEVQIPLTESYCGPCPKNWICYKNNCYQFFDESKNWYESQASCMSQNASLLKVYSKEDQDLLKLVKSYHWMGLVHIPTNGSWQWEDGSILSPNLLTIIEMQKGDCALYASSFKGYIENCSTPNTYICMQRTVSDPTRVETATETAWISLVTALHLVLGLSAVLGLLLLRWQFPAHYRRLRHALWPSLPDLHRVLGQYLRDTAALSPPKATVSDTCEEVEPSLLEILPKSSERTPLPLKSRQTPPLASVEMEAMEALPVTWGTSSRDEDLENCSHHLECDFTSPGDEGPPRSYLRQWVVIPPPLSSPGPQAS

SEQ ID NO: 85 - protein, 956 aa, Artificial Sequence
  BM NKG2D-IL15Ralpha-IL-21R-3 amino acid sequence
MALPVTALLLPLALLLHAARPDVVMTQSPLSLPVTPGEPASISCRSSQSLVHSNANTYLHWYLQKPGQSPQLLIYKVSNRFSGVPDRFSGSGSGTDFTLKISRVEAEDVGVYYCSQNTHVPPTFGQGTKLEIKRGGGGSGGGGSGGGGSQVQLVQSGAEVKKPGASVKVSCKASGYTFTDYEMHWVRQAPGQGLEWMGALDPKTGDTAYSQKFKGRVTLTADESTSTAYMELSSLRSEDTAVYYCTRFYSYTYWGQGTLVTVSSTTTPAPRPPTPAPTIASQPLSLRPEACRPAAGGAVHTRGLDFACDIYIWAPLAGTCGVLLLSLVITLYCKRGRKKLLYIFKQPFMRPVQTTQEEDGCSCRFPEEEEGGCELRVKFSRSADAPAYKQGQNQLYNELNLGRREEYDVLDKRRGRDPEMGGKPRRKNPQEGLYNELQKDKMAEAYSEIGMKGERRRGKGHDGLYQGLSTATKDTYDALHMQALPPRGSGATNFSLLKQAGDVEENPGPMALPVTALLLPLALLLHAARPSLFNQEVQIPLTESYCGPCPKNWICYKNNCYQFFDESKNWYESQASCMSQNASLLKVYSKEDQDLLKLVKSYHWMGLVHIPTNGSWQWEDGSILSPNLLTIIEMQKGDCALYASSFKGYIENCSTPNTYICMQRTVSDPTRVETATETAWISLVTALHLVLGLSAVLGLLLLRWQFPAHYRRLRHALWPSLPDLHRVLGQYLRDTAALSPPKATVSDTCEEVEPSLLEILPKSSERTPLPLKSRQTPPLASVEMEAMEALPVTWGTSSRDEDLENCSHHLLELGPWSPEVPSTLEVYSCHPPRSPAKRLQLTELQEPAELVESDGVPKPSFWPTAQNSGGSAYSEERDRPYGLVSIDTVTVLDAEGPCTWPCSCEDDGYPALDLDAGLEPSECDFTSPGDEGPPRSYLRQWVVIPPPLSSPGPQAS

SEQ ID NO: 86 - protein, 843 aa, Artificial Sequence
  BM NKG2D-IL15Ralpha-IL-23R-2 amino acid sequence
MALPVTALLLPLALLLHAARPDVVMTQSPLSLPVTPGEPASISCRSSQSLVHSNANTYLHWYLQKPGQSPQLLIYKVSNRFSGVPDRFSGSGSGTDFTLKISRVEAEDVGVYYCSQNTHVPPTFGQGTKLEIKRGGGGSGGGGSGGGGSQVQLVQSGAEVKKPGASVKVSCKASGYTFTDYEMHWVRQAPGQGLEWMGALDPKTGDTAYSQKFKGRVTLTADESTSTAYMELSSLRSEDTAVYYCTRFYSYTYWGQGTLVTVSSTTTPAPRPPTPAPTIASQPLSLRPEACRPAAGGAVHTRGLDFACDIYIWAPLAGTCGVLLLSLVITLYCKRGRKKLLYIFKQPFMRPVQTTQEEDGCSCRFPEEEEGGCELRVKFSRSADAPAYKQGQNQLYNELNLGRREEYDVLDKRRGRDPEMGGKPRRKNPQEGLYNELQKDKMAEAYSEIGMKGERRRGKGHDGLYQGLSTATKDTYDALHMQALPPRGSGATNFSLLKQAGDVEENPGPMALPVTALLLPLALLLHAARPSLFNQEVQIPLTESYCGPCPKNWICYKNNCYQFFDESKNWYESQASCMSQNASLLKVYSKEDQDLLKLVKSYHWMGLVHIPTNGSWQWEDGSILSPNLLTIIEMQKGDCALYASSFKGYIENCSTPNTYICMQRTVSDPTRVETATETAWISLVTALHLVLGLSAVLGLLLLRWQFPAHYRRLRHALWPSLPDLHRVLGQYLRDTAALSPPKATVSDTCEEVEPSLLEILPKSSERTPLPLKSRQTPPLASVEMEAMEALPVTWGTSSRDEDLENCSHHLEFVSCLGIVNEELPSINTYFPQNILESHFNRIS

SEQ ID NO: 87 - protein, 840 aa, Artificial Sequence
  BM NKG2D-IL15Ralpha-GM-CSFRalpha amino acid sequence
MALPVTALLLPLALLLHAARPDVVMTQSPLSLPVTPGEPASISCRSSQSLVHSNANTYLHWYLQKPGQSPQLLIYKVSNRFSGVPDRFSGSGSGTDFTLKISRVEAEDVGVYYCSQNTHVPPTFGQGTKLEIKRGGGGSGGGGSGGGGSQVQLVQSGAEVKKPGASVKVSCKASGYTFTDYEMHWVRQAPGQGLEWMGALDPKTGDTAYSQKFKGRVTLTADESTSTAYMELSSLRSEDTAVYYCTRFYSYTYWGQGTLVTVSSTTTPAPRPPTPAPTIASQPLSLRPEACRPAAGGAVHTRGLDFACDIYIWAPLAGTCGVLLLSLVITLYCKRGRKKLLYIFKQPFMRPVQTTQEEDGCSCRFPEEEEGGCELRVKFSRSADAPAYKQGQNQLYNELNLGRREEYDVLDKRRGRDPEMGGKPRRKNPQEGLYNELQKDKMAEAYSEIGMKGERRRGKGHDGLYQGLSTATKDTYDALHMQALPPRGSGATNFSLLKQAGDVEENPGPMALPVTALLLPLALLLHAARPSLFNQEVQIPLTESYCGPCPKNWICYKNNCYQFFDESKNWYESQASCMSQNASLLKVYSKEDQDLLKLVKSYHWMGLVHIPTNGSWQWEDGSILSPNLLTIIEMQKGDCALYASSFKGYIENCSTPNTYICMQRTVSDPTRVETATETAWISLVTALHLVLGLSAVLGLLLLRWQFPAHYRRLRHALWPSLPDLHRVLGQYLRDTAALSPPKATVSDTCEEVEPSLLEILPKSSERTPLPLKSRQTPPLASVEMEAMEALPVTWGTSSRDEDLENCSHHLEVEDEIIWEEFTPEEGKGYREEVLTVKEIT

SEQ ID NO: 88 - protein, 929 aa, Artificial Sequence
  BM NKG2D-IL15Ralpha-GM-CSFRbeta-1 amino acid sequence
MALPVTALLLPLALLLHAARPDVVMTQSPLSLPVTPGEPASISCRSSQSLVHSNANTYLHWYLQKPGQSPQLLIYKVSNRFSGVPDRFSGSGSGTDFTLKISRVEAEDVGVYYCSQNTHVPPTFGQGTKLEIKRGGGGSGGGGSGGGGSQVQLVQSGAEVKKPGASVKVSCKASGYTFTDYEMHWVRQAPGQGLEWMGALDPKTGDTAYSQKFKGRVTLTADESTSTAYMELSSLRSEDTAVYYCTRFYSYTYWGQGTLVTVSSTTTPAPRPPTPAPTIASQPLSLRPEACRPAAGGAVHTRGLDFACDIYIWAPLAGTCGVLLLSLVITLYCKRGRKKLLYIFKQPFMRPVQTTQEEDGCSCRFPEEEEGGCELRVKFSRSADAPAYKQGQNQLYNELNLGRREEYDVLDKRRGRDPEMGGKPRRKNPQEGLYNELQKDKMAEAYSEIGMKGERRRGKGHDGLYQGLSTATKDTYDALHMQALPPRGSGATNFSLLKQAGDVEENPGPMALPVTALLLPLALLLHAARPSLFNQEVQIPLTESYCGPCPKNWICYKNNCYQFFDESKNWYESQASCMSQNASLLKVYSKEDQDLLKLVKSYHWMGLVHIPTNGSWQWEDGSILSPNLLTIIEMQKGDCALYASSFKGYIENCSTPNTYICMQRTVSDPTRVETATETAWISLVTALHLVLGLSAVLGLLLLRWQFPAHYRRLRHALWPSLPDLHRVLGQYLRDTAALSPPKATVSDTCEEVEPSLLEILPKSSERTPLPLKSRQTPPLASVEMEAMEALPVTWGTSSRDEDLENCSHHLDTEDPGVASGYVSSADLVFTPNSGASSVSGPPGAPGPVKSGFEGYVELPPIEGRSPRSQPEGLLVLQQVGDYCFLPGLGPGPLSLRSKQVPVIQLFKALKQQDYLSLPPWEVNKPGEVC

SEQ ID NO: 89 - protein, 993 aa, Artificial Sequence
  BM NKG2D-IL15Ralpha-GM-CSFRbeta-2 amino acid sequence
MALPVTALLLPLALLLHAARPDVVMTQSPLSLPVTPGEPASISCRSSQSLVHSNANTYLHWYLQKPGQSPQLLIYKVSNRFSGVPDRFSGSGSGTDFTLKISRVEAEDVGVYYCSQNTHVPPTFGQGTKLEIKRGGGGSGGGGSGGGGSQVQLVQSGAEVKKPGASVKVSCKASGYTFTDYEMHWVRQAPGQGLEWMGALDPKTGDTAYSQKFKGRVTLTADESTSTAYMELSSLRSEDTAVYYCTRFYSYTYWGQGTLVTVSSTTTPAPRPPTPAPTIASQPLSLRPEACRPAAGGAVHTRGLDFACDIYIWAPLAGTCGVLLLSLVITLYCKRGRKKLLYIFKQPFMRPVQTTQEEDGCSCRFPEEEEGGCELRVKFSRSADAPAYKQGQNQLYNELNLGRREEYDVLDKRRGRDPEMGGKPRRKNPQEGLYNELQKDKMAEAYSEIGMKGERRRGKGHDGLYQGLSTATKDTYDALHMQALPPRGSGATNFSLLKQAGDVEENPGPMALPVTALLLPLALLLHAARPSLFNQEVQIPLTESYCGPCPKNWICYKNNCYQFFDESKNWYESQASCMSQNASLLKVYSKEDQDLLKLVKSYHWMGLVHIPTNGSWQWEDGSILSPNLLTIIEMQKGDCALYASSFKGYIENCSTPNTYICMQRTVSDPTRVETATETAWISLVTALHLVLGLSAVLGLLLLRWQFPAHYRRLRHALWPSLPDLHRVLGQYLRDTAALSPPKATVSDTCEEVEPSLLEILPKSSERTPLPLKSRQTPPLASVEMEAMEALPVTWGTSSRDEDLENCSHHLEKQASSFDFNGPYLGPPHSRSLPDILGQPEPPQEGGSQKSPPPGSLEYLCLPAGGQVQLVPLAQDTEDPGVASGYVSSADLVFTPNSGASSVSGPPGAPGPVKSGFEGYVELPPIEGRSPRSQPEGLLVLQQVGDYCFLPGLGPGPLSLRSKQVPVIQLFKALKQQDYLSLPPWEVNKPGEVC

SEQ ID NO: 90 - protein, 1101 aa, Artificial Sequence
  BM NKG2D-IL15Rbeta-1-IL-21R-1 amino acid sequence
MALPVTALLLPLALLLHAARPDVVMTQSPLSLPVTPGEPASISCRSSQSLVHSNANTYLHWYLQKPGQSPQLLIYKVSNRFSGVPDRFSGSGSGTDFTLKISRVEAEDVGVYYCSQNTHVPPTFGQGTKLEIKRGGGGSGGGGSGGGGSQVQLVQSGAEVKKPGASVKVSCKASGYTFTDYEMHWVRQAPGQGLEWMGALDPKTGDTAYSQKFKGRVTLTADESTSTAYMELSSLRSEDTAVYYCTRFYSYTYWGQGTLVTVSSTTTPAPRPPTPAPTIASQPLSLRPEACRPAAGGAVHTRGLDFACDIYIWAPLAGTCGVLLLSLVITLYCKRGRKKLLYIFKQPFMRPVQTTQEEDGCSCRFPEEEEGGCELRVKFSRSADAPAYKQGQNQLYNELNLGRREEYDVLDKRRGRDPEMGGKPRRKNPQEGLYNELQKDKMAEAYSEIGMKGERRRGKGHDGLYQGLSTATKDTYDALHMQALPPRGSGATNFSLLKQAGDVEENPGPMALPVTALLLPLALLLHAARPSLFNQEVQIPLTESYCGPCPKNWICYKNNCYQFFDESKNWYESQASCMSQNASLLKVYSKEDQDLLKLVKSYHWMGLVHIPTNGSWQWEDGSILSPNLLTIIEMQKGDCALYASSFKGYIENCSTPNTYICMQRTVSDPTRVETATETAWISLVTALHLVLGLSAVLGLLLLRWQFPAHYRRLRHALWPSLPDLHRVLGQYLRDTAALSPPKATVSDTCEEVEPSLLEILPKSSERTPLPLVTQLLLQQDKVPEPASLSSNHSLTSCFTNQGYFFFHLPDALEIEACQVYFTYDPYSEEDPDEGVAGAPTGSSPQPLQPLSGEDDAYCTFPSRDDLLLFSPSLLGGPSPPSTAPGGSGAGEERMPPSLQERVPRDWDPQPLGPPTPGVPDLVDFQPPPELVLREAGEEVPDAGPREGVSFPWSRPPGQGEFRALNARLPLNTDAYLSLQELQGQDPTHLVLELGPWSPEVPSTLEVYSCHPPRSPAKRLQLTELQEPAELVESDGVPKPSFWPTAQNSGGSAYSEERDRPYGLVSIDTVTVLDAEGPCTWPCSCEDDGYPALDLDAGLEPS

SEQ ID NO: 91 - protein, 1025 aa, Artificial Sequence
  BM NKG2D-IL15Rbeta-1-IL-21R-2 amino acid sequence
MALPVTALLLPLALLLHAARPDVVMTQSPLSLPVTPGEPASISCRSSQSLVHSNANTYLHWYLQKPGQSPQLLIYKVSNRFSGVPDRFSGSGSGTDFTLKISRVEAEDVGVYYCSQNTHVPPTFGQGTKLEIKRGGGGSGGGGSGGGGSQVQLVQSGAEVKKPGASVKVSCKASGYTFTDYEMHWVRQAPGQGLEWMGALDPKTGDTAYSQKFKGRVTLTADESTSTAYMELSSLRSEDTAVYYCTRFYSYTYWGQGTLVTVSSTTTPAPRPPTPAPTIASQPLSLRPEACRPAAGGAVHTRGLDFACDIYIWAPLAGTCGVLLLSLVITLYCKRGRKKLLYIFKQPFMRPVQTTQEEDGCSCRFPEEEEGGCELRVKFSRSADAPAYKQGQNQLYNELNLGRREEYDVLDKRRGRDPEMGGKPRRKNPQEGLYNELQKDKMAEAYSEIGMKGERRRGKGHDGLYQGLSTATKDTYDALHMQALPPRGSGATNFSLLKQAGDVEENPGPMALPVTALLLPLALLLHAARPSLFNQEVQIPLTESYCGPCPKNWICYKNNCYQFFDESKNWYESQASCMSQNASLLKVYSKEDQDLLKLVKSYHWMGLVHIPTNGSWQWEDGSILSPNLLTIIEMQKGDCALYASSFKGYIENCSTPNTYICMQRTVSDPTRVETATETAWISLVTALHLVLGLSAVLGLLLLRWQFPAHYRRLRHALWPSLPDLHRVLGQYLRDTAALSPPKATVSDTCEEVEPSLLEILPKSSERTPLPLVTQLLLQQDKVPEPASLSSNHSLTSCFTNQGYFFFHLPDALEIEACQVYFTYDPYSEEDPDEGVAGAPTGSSPQPLQPLSGEDDAYCTFPSRDDLLLFSPSLLGGPSPPSTAPGGSGAGEERMPPSLQERVPRDWDPQPLGPPTPGVPDLVDFQPPPELVLREAGEEVPDAGPREGVSFPWSRPPGQGEFRALNARLPLNTDAYLSLQELQGQDPTHLVECDFTSPGDEGPPRSYLRQWVVIPPPLSSPGPQAS

SEQ ID NO: 92 - protein, 1136 aa, Artificial Sequence
  BM NKG2D-IL15Rbeta-1-IL-21R-3 amino acid sequence
MALPVTALLLPLALLLHAARPDVVMTQSPLSLPVTPGEPASISCRSSQSLVHSNANTYLHWYLQKPGQSPQLLIYKVSNRFSGVPDRFSGSGSGTDFTLKISRVEAEDVGVYYCSQNTHVPPTFGQGTKLEIKRGGGGSGGGGSGGGGSQVQLVQSGAEVKKPGASVKVSCKASGYTFTDYEMHWVRQAPGQGLEWMGALDPKTGDTAYSQKFKGRVTLTADESTSTAYMELSSLRSEDTAVYYCTRFYSYTYWGQGTLVTVSSTTTPAPRPPTPAPTIASQPLSLRPEACRPAAGGAVHTRGLDFACDIYIWAPLAGTCGVLLLSLVITLYCKRGRKKLLYIFKQPFMRPVQTTQEEDGCSCRFPEEEEGGCELRVKFSRSADAPAYKQGQNQLYNELNLGRREEYDVLDKRRGRDPEMGGKPRRKNPQEGLYNELQKDKMAEAYSEIGMKGERRRGKGHDGLYQGLSTATKDTYDALHMQALPPRGSGATNFSLLKQAGDVEENPGPMALPVTALLLPLALLLHAARPSLFNQEVQIPLTESYCGPCPKNWICYKNNCYQFFDESKNWYESQASCMSQNASLLKVYSKEDQDLLKLVKSYHWMGLVHIPTNGSWQWEDGSILSPNLLTIIEMQKGDCALYASSFKGYIENCSTPNTYICMQRTVSDPTRVETATETAWISLVTALHLVLGLSAVLGLLLLRWQFPAHYRRLRHALWPSLPDLHRVLGQYLRDTAALSPPKATVSDTCEEVEPSLLEILPKSSERTPLPLVTQLLLQQDKVPEPASLSSNHSLTSCFTNQGYFFFHLPDALEIEACQVYFTYDPYSEEDPDEGVAGAPTGSSPQPLQPLSGEDDAYCTFPSRDDLLLFSPSLLGGPSPPSTAPGGSGAGEERMPPSLQERVPRDWDPQPLGPPTPGVPDLVDFQPPPELVLREAGEEVPDAGPREGVSFPWSRPPGQGEFRALNARLPLNTDAYLSLQELQGQDPTHLVLELGPWSPEVPSTLEVYSCHPPRSPAKRLQLTELQEPAELVESDGVPKPSFWPTAQNSGGSAYSEERDRPYGLVSIDTVTVLDAEGPCTWPCSCEDDGYPALDLDAGLEPSECDFTSPGDEGPPRSYLRQWVVIPPPLSSPGPQAS

SEQ ID NO: 93 - protein, 1023 aa, Artificial Sequence
  BM NKG2D-IL15Rbeta-1-IL-23R-2 amino acid sequence
MALPVTALLLPLALLLHAARPDVVMTQSPLSLPVTPGEPASISCRSSQSLVHSNANTYLHWYLQKPGQSPQLLIYKVSNRFSGVPDRFSGSGSGTDFTLKISRVEAEDVGVYYCSQNTHVPPTFGQGTKLEIKRGGGGSGGGGSGGGGSQVQLVQSGAEVKKPGASVKVSCKASGYTFTDYEMHWVRQAPGQGLEWMGALDPKTGDTAYSQKFKGRVTLTADESTSTAYMELSSLRSEDTAVYYCTRFYSYTYWGQGTLVTVSSTTTPAPRPPTPAPTIASQPLSLRPEACRPAAGGAVHTRGLDFACDIYIWAPLAGTCGVLLLSLVITLYCKRGRKKLLYIFKQPFMRPVQTTQEEDGCSCRFPEEEEGGCELRVKFSRSADAPAYKQGQNQLYNELNLGRREEYDVLDKRRGRDPEMGGKPRRKNPQEGLYNELQKDKMAEAYSEIGMKGERRRGKGHDGLYQGLSTATKDTYDALHMQALPPRGSGATNFSLLKQAGDVEENPGPMALPVTALLLPLALLLHAARPSLFNQEVQIPLTESYCGPCPKNWICYKNNCYQFFDESKNWYESQASCMSQNASLLKVYSKEDQDLLKLVKSYHWMGLVHIPTNGSWQWEDGSILSPNLLTIIEMQKGDCALYASSFKGYIENCSTPNTYICMQRTVSDPTRVETATETAWISLVTALHLVLGLSAVLGLLLLRWQFPAHYRRLRHALWPSLPDLHRVLGQYLRDTAALSPPKATVSDTCEEVEPSLLEILPKSSERTPLPLVTQLLLQQDKVPEPASLSSNHSLTSCFTNQGYFFFHLPDALEIEACQVYFTYDPYSEEDPDEGVAGAPTGSSPQPLQPLSGEDDAYCTFPSRDDLLLFSPSLLGGPSPPSTAPGGSGAGEERMPPSLQERVPRDWDPQPLGPPTPGVPDLVDFQPPPELVLREAGEEVPDAGPREGVSFPWSRPPGQGEFRALNARLPLNTDAYLSLQELQGQDPTHLVEFVSCLGIVNEELPSINTYFPQNILESHFNRIS

SEQ ID NO: 94 - protein, 1020 aa, Artificial Sequence
  BM NKG2D-IL15Rbeta-1-GM-CSFRalpha amino acid sequence
MALPVTALLLPLALLLHAARPDVVMTQSPLSLPVTPGEPASISCRSSQSLVHSNANTYLHWYLQKPGQSPQLLIYKVSNRFSGVPDRFSGSGSGTDFTLKISRVEAEDVGVYYCSQNTHVPPTFGQGTKLEIKRGGGGSGGGGSGGGGSQVQLVQSGAEVKKPGASVKVSCKASGYTFTDYEMHWVRQAPGQGLEWMGALDPKTGDTAYSQKFKGRVTLTADESTSTAYMELSSLRSEDTAVYYCTRFYSYTYWGQGTLVTVSSTTTPAPRPPTPAPTIASQPLSLRPEACRPAAGGAVHTRGLDFACDIYIWAPLAGTCGVLLLSLVITLYCKRGRKKLLYIFKQPFMRPVQTTQEEDGCSCRFPEEEEGGCELRVKFSRSADAPAYKQGQNQLYNELNLGRREEYDVLDKRRGRDPEMGGKPRRKNPQEGLYNELQKDKMAEAYSEIGMKGERRRGKGHDGLYQGLSTATKDTYDALHMQALPPRGSGATNFSLLKQAGDVEENPGPMALPVTALLLPLALLLHAARPSLFNQEVQIPLTESYCGPCPKNWICYKNNCYQFFDESKNWYESQASCMSQNASLLKVYSKEDQDLLKLVKSYHWMGLVHIPTNGSWQWEDGSILSPNLLTIIEMQKGDCALYASSFKGYIENCSTPNTYICMQRTVSDPTRVETATETAWISLVTALHLVLGLSAVLGLLLLRWQFPAHYRRLRHALWPSLPDLHRVLGQYLRDTAALSPPKATVSDTCEEVEPSLLEILPKSSERTPLPLVTQLLLQQDKVPEPASLSSNHSLTSCFTNQGYFFFHLPDALEIEACQVYFTYDPYSEEDPDEGVAGAPTGSSPQPLQPLSGEDDAYCTFPSRDDLLLFSPSLLGGPSPPSTAPGGSGAGEERMPPSLQERVPRDWDPQPLGPPTPGVPDLVDFQPPPELVLREAGEEVPDAGPREGVSFPWSRPPGQGEFRALNARLPLNTDAYLSLQELQGQDPTHLVEVEDEIIWEEFTPEEGKGYREEVLTVKEIT

SEQ ID NO: 95 - protein, 1109 aa, Artificial Sequence
  BM NKG2D-IL15Rbeta-1-GM-CSFRbeta-1 amino acid sequence
MALPVTALLLPLALLLHAARPDVVMTQSPLSLPVTPGEPASISCRSSQSLVHSNANTYLHWYLQKPGQSPQLLIYKVSNRFSGVPDRFSGSGSGTDFTLKISRVEAEDVGVYYCSQNTHVPPTFGQGTKLEIKRGGGGSGGGGSGGGGSQVQLVQSGAEVKKPGASVKVSCKASGYTFTDYEMHWVRQAPGQGLEWMGALDPKTGDTAYSQKFKGRVTLTADESTSTAYMELSSLRSEDTAVYYCTRFYSYTYWGQGTLVTVSSTTTPAPRPPTPAPTIASQPLSLRPEACRPAAGGAVHTRGLDFACDIYIWAPLAGTCGVLLLSLVITLYCKRGRKKLLYIFKQPFMRPVQTTQEEDGCSCRFPEEEEGGCELRVKFSRSADAPAYKQGQNQLYNELNLGRREEYDVLDKRRGRDPEMGGKPRRKNPQEGLYNELQKDKMAEAYSEIGMKGERRRGKGHDGLYQGLSTATKDTYDALHMQALPPRGSGATNFSLLKQAGDVEENPGPMALPVTALLLPLALLLHAARPSLFNQEVQIPLTESYCGPCPKNWICYKNNCYQFFDESKNWYESQASCMSQNASLLKVYSKEDQDLLKLVKSYHWMGLVHIPTNGSWQWEDGSILSPNLLTIIEMQKGDCALYASSFKGYIENCSTPNTYICMQRTVSDPTRVETATETAWISLVTALHLVLGLSAVLGLLLLRWQFPAHYRRLRHALWPSLPDLHRVLGQYLRDTAALSPPKATVSDTCEEVEPSLLEILPKSSERTPLPLVTQLLLQQDKVPEPASLSSNHSLTSCFTNQGYFFFHLPDALEIEACQVYFTYDPYSEEDPDEGVAGAPTGSSPQPLQPLSGEDDAYCTFPSRDDLLLFSPSLLGGPSPPSTAPGGSGAGEERMPPSLQERVPRDWDPQPLGPPTPGVPDLVDFQPPPELVLREAGEEVPDAGPREGVSFPWSRPPGQGEFRALNARLPLNTDAYLSLQELQGQDPTHLVDTEDPGVASGYVSSADLVFTPNSGASSVSGPPGAPGPVKSGFEGYVELPPIEGRSPRSQPEGLLVLQQVGDYCFLPGLGPGPLSLRSKQVPVIQLFKALKQQDYLSLPPWEVNKPGEVC

SEQ ID NO: 96 - protein, 1173 aa, Artificial Sequence
  BM NKG2D-IL15Rbeta-1-GM-CSFRbeta-2 amino acid sequence
MALPVTALLLPLALLLHAARPDVVMTQSPLSLPVTPGEPASISCRSSQSLVHSNANTYLHWYLQKPGQSPQLLIYKVSNRFSGVPDRFSGSGSGTDFTLKISRVEAEDVGVYYCSQNTHVPPTFGQGTKLEIKRGGGGSGGGGSGGGGSQVQLVQSGAEVKKPGASVKVSCKASGYTFTDYEMHWVRQAPGQGLEWMGALDPKTGDTAYSQKFKGRVTLTADESTSTAYMELSSLRSEDTAVYYCTRFYSYTYWGQGTLVTVSSTTTPAPRPPTPAPTIASQPLSLRPEACRPAAGGAVHTRGLDFACDIYIWAPLAGTCGVLLLSLVITLYCKRGRKKLLYIFKQPFMRPVQTTQEEDGCSCRFPEEEEGGCELRVKFSRSADAPAYKQGQNQLYNELNLGRREEYDVLDKRRGRDPEMGGKPRRKNPQEGLYNELQKDKMAEAYSEIGMKGERRRGKGHDGLYQGLSTATKDTYDALHMQALPPRGSGATNFSLLKQAGDVEENPGPMALPVTALLLPLALLLHAARPSLFNQEVQIPLTESYCGPCPKNWICYKNNCYQFFDESKNWYESQASCMSQNASLLKVYSKEDQDLLKLVKSYHWMGLVHIPTNGSWQWEDGSILSPNLLTIIEMQKGDCALYASSFKGYIENCSTPNTYICMQRTVSDPTRVETATETAWISLVTALHLVLGLSAVLGLLLLRWQFPAHYRRLRHALWPSLPDLHRVLGQYLRDTAALSPPKATVSDTCEEVEPSLLEILPKSSERTPLPLVTQLLLQQDKVPEPASLSSNHSLTSCFTNQGYFFFHLPDALEIEACQVYFTYDPYSEEDPDEGVAGAPTGSSPQPLQPLSGEDDAYCTFPSRDDLLLFSPSLLGGPSPPSTAPGGSGAGEERMPPSLQERVPRDWDPQPLGPPTPGVPDLVDFQPPPELVLREAGEEVPDAGPREGVSFPWSRPPGQGEFRALNARLPLNTDAYLSLQELQGQDPTHLVEKQASSFDFNGPYLGPPHSRSLPDILGQPEPPQEGGSQKSPPPGSLEYLCLPAGGQVQLVPLAQDTEDPGVASGYVSSADLVFTPNSGASSVSGPPGAPGPVKSGFEGYVELPPIEGRSPRSQPEGLLVLQQVGDYCFLPGLGPGPLSLRSKQVPVIQLFKALKQQDYLSLPPWEVNKPGEVC

SEQ ID NO: 97 - protein, 1000 aa, Artificial Sequence
  BM NKG2D-IL15Rbeta-2-IL-21R-1 amino acid sequence
MALPVTALLLPLALLLHAARPDVVMTQSPLSLPVTPGEPASISCRSSQSLVHSNANTYLHWYLQKPGQSPQLLIYKVSNRFSGVPDRFSGSGSGTDFTLKISRVEAEDVGVYYCSQNTHVPPTFGQGTKLEIKRGGGGSGGGGSGGGGSQVQLVQSGAEVKKPGASVKVSCKASGYTFTDYEMHWVRQAPGQGLEWMGALDPKTGDTAYSQKFKGRVTLTADESTSTAYMELSSLRSEDTAVYYCTRFYSYTYWGQGTLVTVSSTTTPAPRPPTPAPTIASQPLSLRPEACRPAAGGAVHTRGLDFACDIYIWAPLAGTCGVLLLSLVITLYCKRGRKKLLYIFKQPFMRPVQTTQEEDGCSCRFPEEEEGGCELRVKFSRSADAPAYKQGQNQLYNELNLGRREEYDVLDKRRGRDPEMGGKPRRKNPQEGLYNELQKDKMAEAYSEIGMKGERRRGKGHDGLYQGLSTATKDTYDALHMQALPPRGSGATNFSLLKQAGDVEENPGPMALPVTALLLPLALLLHAARPSLFNQEVQIPLTESYCGPCPKNWICYKNNCYQFFDESKNWYESQASCMSQNASLLKVYSKEDQDLLKLVKSYHWMGLVHIPTNGSWQWEDGSILSPNLLTIIEMQKGDCALYASSFKGYIENCSTPNTYICMQRTVSDPTRVETATETAWISLVTALHLVLGLSAVLGLLLLRWQFPAHYRRLRHALWPSLPDLHRVLGQYLRDTAALSPPKATVSDTCEEVEPSLLEILPKSSERTPLPLEPASLSSNHSLTSCFTNQGYFFFHLPDALEIEACQVYFTYDPYSEEDPDEGVAGAPTGSSPQPLQPLSGEDDAYCTFPSRDDLLLFSEFRALNARLPLNTDAYLSLQELQGQDPTHLVLELGPWSPEVPSTLEVYSCHPPRSPAKRLQLTELQEPAELVESDGVPKPSFWPTAQNSGGSAYSEERDRPYGLVSIDTVTVLDAEGPCTWPCSCEDDGYPALDLDAGLEPS

SEQ ID NO: 98 - protein, 924 aa, Artificial Sequence
  BM NKG2D-IL15Rbeta-2-IL-21R-2 amino acid sequence
MALPVTALLLPLALLLHAARPDVVMTQSPLSLPVTPGEPASISCRSSQSLVHSNANTYLHWYLQKPGQSPQLLIYKVSNRFSGVPDRFSGSGSGTDFTLKISRVEAEDVGVYYCSQNTHVPPTFGQGTKLEIKRGGGGSGGGGSGGGGSQVQLVQSGAEVKKPGASVKVSCKASGYTFTDYEMHWVRQAPGQGLEWMGALDPKTGDTAYSQKFKGRVTLTADESTSTAYMELSSLRSEDTAVYYCTRFYSYTYWGQGTLVTVSSTTTPAPRPPTPAPTIASQPLSLRPEACRPAAGGAVHTRGLDFACDIYIWAPLAGTCGVLLLSLVITLYCKRGRKKLLYIFKQPFMRPVQTTQEEDGCSCRFPEEEEGGCELRVKFSRSADAPAYKQGQNQLYNELNLGRREEYDVLDKRRGRDPEMGGKPRRKNPQEGLYNELQKDKMAEAYSEIGMKGERRRGKGHDGLYQGLSTATKDTYDALHMQALPPRGSGATNFSLLKQAGDVEENPGPMALPVTALLLPLALLLHAARPSLFNQEVQIPLTESYCGPCPKNWICYKNNCYQFFDESKNWYESQASCMSQNASLLKVYSKEDQDLLKLVKSYHWMGLVHIPTNGSWQWEDGSILSPNLLTIIEMQKGDCALYASSFKGYIENCSTPNTYICMQRTVSDPTRVETATETAWISLVTALHLVLGLSAVLGLLLLRWQFPAHYRRLRHALWPSLPDLHRVLGQYLRDTAALSPPKATVSDTCEEVEPSLLEILPKSSERTPLPLEPASLSSNHSLTSCFTNQGYFFFHLPDALEIEACQVYFTYDPYSEEDPDEGVAGAPTGSSPQPLQPLSGEDDAYCTFPSRDDLLLFSEFRALNARLPLNTDAYLSLQELQGQDPTHLVECDFTSPGDEGPPRSYLRQWVVIPPPLSSPGPQAS

SEQ ID NO: 99 - protein, 1035 aa, Artificial Sequence
  BM NKG2D-IL15Rbeta-2-IL-21R-3 amino acid sequence
MALPVTALLLPLALLLHAARPDVVMTQSPLSLPVTPGEPASISCRSSQSLVHSNANTYLHWYLQKPGQSPQLLIYKVSNRFSGVPDRFSGSGSGTDFTLKISRVEAEDVGVYYCSQNTHVPPTFGQGTKLEIKRGGGGSGGGGSGGGGSQVQLVQSGAEVKKPGASVKVSCKASGYTFTDYEMHWVRQAPGQGLEWMGALDPKTGDTAYSQKFKGRVTLTADESTSTAYMELSSLRSEDTAVYYCTRFYSYTYWGQGTLVTVSSTTTPAPRPPTPAPTIASQPLSLRPEACRPAAGGAVHTRGLDFACDIYIWAPLAGTCGVLLLSLVITLYCKRGRKKLLYIFKQPFMRPVQTTQEEDGCSCRFPEEEEGGCELRVKFSRSADAPAYKQGQNQLYNELNLGRREEYDVLDKRRGRDPEMGGKPRRKNPQEGLYNELQKDKMAEAYSEIGMKGERRRGKGHDGLYQGLSTATKDTYDALHMQALPPRGSGATNFSLLKQAGDVEENPGPMALPVTALLLPLALLLHAARPSLFNQEVQIPLTESYCGPCPKNWICYKNNCYQFFDESKNWYESQASCMSQNASLLKVYSKEDQDLLKLVKSYHWMGLVHIPTNGSWQWEDGSILSPNLLTIIEMQKGDCALYASSFKGYIENCSTPNTYICMQRTVSDPTRVETATETAWISLVTALHLVLGLSAVLGLLLLRWQFPAHYRRLRHALWPSLPDLHRVLGQYLRDTAALSPPKATVSDTCEEVEPSLLEILPKSSERTPLPLEPASLSSNHSLTSCFTNQGYFFFHLPDALEIEACQVYFTYDPYSEEDPDEGVAGAPTGSSPQPLQPLSGEDDAYCTFPSRDDLLLFSEFRALNARLPLNTDAYLSLQELQGQDPTHLVLELGPWSPEVPSTLEVYSCHPPRSPAKRLQLTELQEPAELVESDGVPKPSFWPTAQNSGGSAYSEERDRPYGLVSIDTVTVLDAEGPCTWPCSCEDDGYPALDLDAGLEPSECDFTSPGDEGPPRSYLRQWVVIPPPLSSPGPQAS

SEQ ID NO: 100 - protein, 922 aa, Artificial Sequence
  BM NKG2D-IL15Rbeta-2-IL-23R-2 amino acid sequence
MALPVTALLLPLALLLHAARPDVVMTQSPLSLPVTPGEPASISCRSSQSLVHSNANTYLHWYLQKPGQSPQLLIYKVSNRFSGVPDRFSGSGSGTDFTLKISRVEAEDVGVYYCSQNTHVPPTFGQGTKLEIKRGGGGSGGGGSGGGGSQVQLVQSGAEVKKPGASVKVSCKASGYTFTDYEMHWVRQAPGQGLEWMGALDPKTGDTAYSQKFKGRVTLTADESTSTAYMELSSLRSEDTAVYYCTRFYSYTYWGQGTLVTVSSTTTPAPRPPTPAPTIASQPLSLRPEACRPAAGGAVHTRGLDFACDIYIWAPLAGTCGVLLLSLVITLYCKRGRKKLLYIFKQPFMRPVQTTQEEDGCSCRFPEEEEGGCELRVKFSRSADAPAYKQGQNQLYNELNLGRREEYDVLDKRRGRDPEMGGKPRRKNPQEGLYNELQKDKMAEAYSEIGMKGERRRGKGHDGLYQGLSTATKDTYDALHMQALPPRGSGATNFSLLKQAGDVEENPGPMALPVTALLLPLALLLHAARPSLFNQEVQIPLTESYCGPCPKNWICYKNNCYQFFDESKNWYESQASCMSQNASLLKVYSKEDQDLLKLVKSYHWMGLVHIPTNGSWQWEDGSILSPNLLTIIEMQKGDCALYASSFKGYIENCSTPNTYICMQRTVSDPTRVETATETAWISLVTALHLVLGLSAVLGLLLLRWQFPAHYRRLRHALWPSLPDLHRVLGQYLRDTAALSPPKATVSDTCEEVEPSLLEILPKSSERTPLPLEPASLSSNHSLTSCFTNQGYFFFHLPDALEIEACQVYFTYDPYSEEDPDEGVAGAPTGSSPQPLQPLSGEDDAYCTFPSRDDLLLFSEFRALNARLPLNTDAYLSLQELQGQDPTHLVEFVSCLGIVNEELPSINTYFPQNILESHFNRIS

SEQ ID NO: 101 - protein, 919 aa, Artificial Sequence
  BM NKG2D-IL15Rbeta-2-GM-CSFRalpha amino acid sequence
MALPVTALLLPLALLLHAARPDVVMTQSPLSLPVTPGEPASISCRSSQSLVHSNANTYLHWYLQKPGQSPQLLIYKVSNRFSGVPDRFSGSGSGTDFTLKISRVEAEDVGVYYCSQNTHVPPTFGQGTKLEIKRGGGGSGGGGSGGGGSQVQLVQSGAEVKKPGASVKVSCKASGYTFTDYEMHWVRQAPGQGLEWMGALDPKTGDTAYSQKFKGRVTLTADESTSTAYMELSSLRSEDTAVYYCTRFYSYTYWGQGTLVTVSSTTTPAPRPPTPAPTIASQPLSLRPEACRPAAGGAVHTRGLDFACDIYIWAPLAGTCGVLLLSLVITLYCKRGRKKLLYIFKQPFMRPVQTTQEEDGCSCRFPEEEEGGCELRVKFSRSADAPAYKQGQNQLYNELNLGRREEYDVLDKRRGRDPEMGGKPRRKNPQEGLYNELQKDKMAEAYSEIGMKGERRRGKGHDGLYQGLSTATKDTYDALHMQALPPRGSGATNFSLLKQAGDVEENPGPMALPVTALLLPLALLLHAARPSLFNQEVQIPLTESYCGPCPKNWICYKNNCYQFFDESKNWYESQASCMSQNASLLKVYSKEDQDLLKLVKSYHWMGLVHIPTNGSWQWEDGSILSPNLLTIIEMQKGDCALYASSFKGYIENCSTPNTYICMQRTVSDPTRVETATETAWISLVTALHLVLGLSAVLGLLLLRWQFPAHYRRLRHALWPSLPDLHRVLGQYLRDTAALSPPKATVSDTCEEVEPSLLEILPKSSERTPLPLEPASLSSNHSLTSCFTNQGYFFFHLPDALEIEACQVYFTYDPYSEEDPDEGVAGAPTGSSPQPLQPLSGEDDAYCTFPSRDDLLLFSEFRALNARLPLNTDAYLSLQELQGQDPTHLVEVEDEIIWEEFTPEEGKGYREEVLTVKEIT

SEQ ID NO: 102 - protein, 1008 aa, Artificial Sequence
  BM NKG2D-IL15Rbeta-2-GM-CSFRbeta-1 amino acid sequence
MALPVTALLLPLALLLHAARPDVVMTQSPLSLPVTPGEPASISCRSSQSLVHSNANTYLHWYLQKPGQSPQLLIYKVSNRFSGVPDRFSGSGSGTDFTLKISRVEAEDVGVYYCSQNTHVPPTFGQGTKLEIKRGGGGSGGGGSGGGGSQVQLVQSGAEVKKPGASVKVSCKASGYTFTDYEMHWVRQAPGQGLEWMGALDPKTGDTAYSQKFKGRVTLTADESTSTAYMELSSLRSEDTAVYYCTRFYSYTYWGQGTLVTVSSTTTPAPRPPTPAPTIASQPLSLRPEACRPAAGGAVHTRGLDFACDIYIWAPLAGTCGVLLLSLVITLYCKRGRKKLLYIFKQPFMRPVQTTQEEDGCSCRFPEEEEGGCELRVKFSRSADAPAYKQGQNQLYNELNLGRREEYDVLDKRRGRDPEMGGKPRRKNPQEGLYNELQKDKMAEAYSEIGMKGERRRGKGHDGLYQGLSTATKDTYDALHMQALPPRGSGATNFSLLKQAGDVEENPGPMALPVTALLLPLALLLHAARPSLFNQEVQIPLTESYCGPCPKNWICYKNNCYQFFDESKNWYESQASCMSQNASLLKVYSKEDQDLLKLVKSYHWMGLVHIPTNGSWQWEDGSILSPNLLTIIEMQKGDCALYASSFKGYIENCSTPNTYICMQRTVSDPTRVETATETAWISLVTALHLVLGLSAVLGLLLLRWQFPAHYRRLRHALWPSLPDLHRVLGQYLRDTAALSPPKATVSDTCEEVEPSLLEILPKSSERTPLPLEPASLSSNHSLTSCFTNQGYFFFHLPDALEIEACQVYFTYDPYSEEDPDEGVAGAPTGSSPQPLQPLSGEDDAYCTFPSRDDLLLFSEFRALNARLPLNTDAYLSLQELQGQDPTHLVDTEDPGVASGYVSSADLVFTPNSGASSVSGPPGAPGPVKSGFEGYVELPPIEGRSPRSQPEGLLVLQQVGDYCFLPGLGPGPLSLRSKQVPVIQLFKALKQQDYLSLPPWEVNKPGEVC

SEQ ID NO: 103 - protein, 1072 aa, Artificial Sequence
  BM NKG2D-IL15Rbeta-2-GM-CSFRbeta-2 amino acid sequence
MALPVTALLLPLALLLHAARPDVVMTQSPLSLPVTPGEPASISCRSSQSLVHSNANTYLHWYLQKPGQSPQLLIYKVSNRFSGVPDRFSGSGSGTDFTLKISRVEAEDVGVYYCSQNTHVPPTFGQGTKLEIKRGGGGSGGGGSGGGGSQVQLVQSGAEVKKPGASVKVSCKASGYTFTDYEMHWVRQAPGQGLEWMGALDPKTGDTAYSQKFKGRVTLTADESTSTAYMELSSLRSEDTAVYYCTRFYSYTYWGQGTLVTVSSTTTPAPRPPTPAPTIASQPLSLRPEACRPAAGGAVHTRGLDFACDIYIWAPLAGTCGVLLLSLVITLYCKRGRKKLLYIFKQPFMRPVQTTQEEDGCSCRFPEEEEGGCELRVKFSRSADAPAYKQGQNQLYNELNLGRREEYDVLDKRRGRDPEMGGKPRRKNPQEGLYNELQKDKMAEAYSEIGMKGERRRGKGHDGLYQGLSTATKDTYDALHMQALPPRGSGATNFSLLKQAGDVEENPGPMALPVTALLLPLALLLHAARPSLFNQEVQIPLTESYCGPCPKNWICYKNNCYQFFDESKNWYESQASCMSQNASLLKVYSKEDQDLLKLVKSYHWMGLVHIPTNGSWQWEDGSILSPNLLTIIEMQKGDCALYASSFKGYIENCSTPNTYICMQRTVSDPTRVETATETAWISLVTALHLVLGLSAVLGLLLLRWQFPAHYRRLRHALWPSLPDLHRVLGQYLRDTAALSPPKATVSDTCEEVEPSLLEILPKSSERTPLPLEPASLSSNHSLTSCFTNQGYFFFHLPDALEIEACQVYFTYDPYSEEDPDEGVAGAPTGSSPQPLQPLSGEDDAYCTFPSRDDLLLFSEFRALNARLPLNTDAYLSLQELQGQDPTHLVEKQASSFDFNGPYLGPPHSRSLPDILGQPEPPQEGGSQKSPPPGSLEYLCLPAGGQVQLVPLAQDTEDPGVASGYVSSADLVFTPNSGASSVSGPPGAPGPVKSGFEGYVELPPIEGRSPRSQPEGLLVLQQVGDYCFLPGLGPGPLSLRSKQVPVIQLFKALKQQDYLSLPPWEVNKPGEVC

SEQ ID NO: 104 - protein, 915 aa, Artificial Sequence
  BM NKG2D-IL-21R-1-IL-23R-2 amino acid sequence
MALPVTALLLPLALLLHAARPDVVMTQSPLSLPVTPGEPASISCRSSQSLVHSNANTYLHWYLQKPGQSPQLLIYKVSNRFSGVPDRFSGSGSGTDFTLKISRVEAEDVGVYYCSQNTHVPPTFGQGTKLEIKRGGGGSGGGGSGGGGSQVQLVQSGAEVKKPGASVKVSCKASGYTFTDYEMHWVRQAPGQGLEWMGALDPKTGDTAYSQKFKGRVTLTADESTSTAYMELSSLRSEDTAVYYCTRFYSYTYWGQGTLVTVSSTTTPAPRPPTPAPTIASQPLSLRPEACRPAAGGAVHTRGLDFACDIYIWAPLAGTCGVLLLSLVITLYCKRGRKKLLYIFKQPFMRPVQTTQEEDGCSCRFPEEEEGGCELRVKFSRSADAPAYKQGQNQLYNELNLGRREEYDVLDKRRGRDPEMGGKPRRKNPQEGLYNELQKDKMAEAYSEIGMKGERRRGKGHDGLYQGLSTATKDTYDALHMQALPPRGSGATNFSLLKQAGDVEENPGPMALPVTALLLPLALLLHAARPSLFNQEVQIPLTESYCGPCPKNWICYKNNCYQFFDESKNWYESQASCMSQNASLLKVYSKEDQDLLKLVKSYHWMGLVHIPTNGSWQWEDGSILSPNLLTIIEMQKGDCALYASSFKGYIENCSTPNTYICMQRTVSDPTRVETATETAWISLVTALHLVLGLSAVLGLLLLRWQFPAHYRRLRHALWPSLPDLHRVLGQYLRDTAALSPPKATVSDTCEEVEPSLLEILPKSSERTPLPLLELGPWSPEVPSTLEVYSCHPPRSPAKRLQLTELQEPAELVESDGVPKPSFWPTAQNSGGSAYSEERDRPYGLVSIDTVTVLDAEGPCTWPCSCEDDGYPALDLDAGLEPSEFVSCLGIVNEELPSINTYFPQNILESHFNRIS

SEQ ID NO: 105 - protein, 912 aa, Artificial Sequence
  BM NKG2D-IL-21R-1-GM-CSFRalpha amino acid sequence
MALPVTALLLPLALLLHAARPDVVMTQSPLSLPVTPGEPASISCRSSQSLVHSNANTYLHWYLQKPGQSPQLLIYKVSNRFSGVPDRFSGSGSGTDFTLKISRVEAEDVGVYYCSQNTHVPPTFGQGTKLEIKRGGGGSGGGGSGGGGSQVQLVQSGAEVKKPGASVKVSCKASGYTFTDYEMHWVRQAPGQGLEWMGALDPKTGDTAYSQKFKGRVTLTADESTSTAYMELSSLRSEDTAVYYCTRFYSYTYWGQGTLVTVSSTTTPAPRPPTPAPTIASQPLSLRPEACRPAAGGAVHTRGLDFACDIYIWAPLAGTCGVLLLSLVITLYCKRGRKKLLYIFKQPFMRPVQTTQEEDGCSCRFPEEEEGGCELRVKFSRSADAPAYKQGQNQLYNELNLGRREEYDVLDKRRGRDPEMGGKPRRKNPQEGLYNELQKDKMAEAYSEIGMKGERRRGKGHDGLYQGLSTATKDTYDALHMQALPPRGSGATNFSLLKQAGDVEENPGPMALPVTALLLPLALLLHAARPSLFNQEVQIPLTESYCGPCPKNWICYKNNCYQFFDESKNWYESQASCMSQNASLLKVYSKEDQDLLKLVKSYHWMGLVHIPTNGSWQWEDGSILSPNLLTIIEMQKGDCALYASSFKGYIENCSTPNTYICMQRTVSDPTRVETATETAWISLVTALHLVLGLSAVLGLLLLRWQFPAHYRRLRHALWPSLPDLHRVLGQYLRDTAALSPPKATVSDTCEEVEPSLLEILPKSSERTPLPLLELGPWSPEVPSTLEVYSCHPPRSPAKRLQLTELQEPAELVESDGVPKPSFWPTAQNSGGSAYSEERDRPYGLVSIDTVTVLDAEGPCTWPCSCEDDGYPALDLDAGLEPSEVEDEIIWEEFTPEEGKGYREEVLTVKEIT

SEQ ID NO: 106 - protein, 1001 aa, Artificial Sequence
  BM NKG2D-IL-21R-1-GM-CSFRbeta-1 amino acid sequence
MALPVTALLLPLALLLHAARPDVVMTQSPLSLPVTPGEPASISCRSSQSLVHSNANTYLHWYLQKPGQSPQLLIYKVSNRFSGVPDRFSGSGSGTDFTLKISRVEAEDVGVYYCSQNTHVPPTFGQGTKLEIKRGGGGSGGGGSGGGGSQVQLVQSGAEVKKPGASVKVSCKASGYTFTDYEMHWVRQAPGQGLEWMGALDPKTGDTAYSQKFKGRVTLTADESTSTAYMELSSLRSEDTAVYYCTRFYSYTYWGQGTLVTVSSTTTPAPRPPTPAPTIASQPLSLRPEACRPAAGGAVHTRGLDFACDIYIWAPLAGTCGVLLLSLVITLYCKRGRKKLLYIFKQPFMRPVQTTQEEDGCSCRFPEEEEGGCELRVKFSRSADAPAYKQGQNQLYNELNLGRREEYDVLDKRRGRDPEMGGKPRRKNPQEGLYNELQKDKMAEAYSEIGMKGERRRGKGHDGLYQGLSTATKDTYDALHMQALPPRGSGATNFSLLKQAGDVEENPGPMALPVTALLLPLALLLHAARPSLFNQEVQIPLTESYCGPCPKNWICYKNNCYQFFDESKNWYESQASCMSQNASLLKVYSKEDQDLLKLVKSYHWMGLVHIPTNGSWQWEDGSILSPNLLTIIEMQKGDCALYASSFKGYIENCSTPNTYICMQRTVSDPTRVETATETAWISLVTALHLVLGLSAVLGLLLLRWQFPAHYRRLRHALWPSLPDLHRVLGQYLRDTAALSPPKATVSDTCEEVEPSLLEILPKSSERTPLPLLELGPWSPEVPSTLEVYSCHPPRSPAKRLQLTELQEPAELVESDGVPKPSFWPTAQNSGGSAYSEERDRPYGLVSIDTVTVLDAEGPCTWPCSCEDDGYPALDLDAGLEPSDTEDPGVASGYVSSADLVFTPNSGASSVSGPPGAPGPVKSGFEGYVELPPIEGRSPRSQPEGLLVLQQVGDYCFLPGLGPGPLSLRSKQVPVIQLFKALKQQDYLSLPPWEVNKPGEVC

SEQ ID NO: 107 - protein, 1065 aa, Artificial Sequence
  BM NKG2D-IL-21R-1-GM-CSFRbeta-2 amino acid sequence
MALPVTALLLPLALLLHAARPDVVMTQSPLSLPVTPGEPASISCRSSQSLVHSNANTYLHWYLQKPGQSPQLLIYKVSNRFSGVPDRFSGSGSGTDFTLKISRVEAEDVGVYYCSQNTHVPPTFGQGTKLEIKRGGGGSGGGGSGGGGSQVQLVQSGAEVKKPGASVKVSCKASGYTFTDYEMHWVRQAPGQGLEWMGALDPKTGDTAYSQKFKGRVTLTADESTSTAYMELSSLRSEDTAVYYCTRFYSYTYWGQGTLVTVSSTTTPAPRPPTPAPTIASQPLSLRPEACRPAAGGAVHTRGLDFACDIYIWAPLAGTCGVLLLSLVITLYCKRGRKKLLYIFKQPFMRPVQTTQEEDGCSCRFPEEEEGGCELRVKFSRSADAPAYKQGQNQLYNELNLGRREEYDVLDKRRGRDPEMGGKPRRKNPQEGLYNELQKDKMAEAYSEIGMKGERRRGKGHDGLYQGLSTATKDTYDALHMQALPPRGSGATNFSLLKQAGDVEENPGPMALPVTALLLPLALLLHAARPSLFNQEVQIPLTESYCGPCPKNWICYKNNCYQFFDESKNWYESQASCMSQNASLLKVYSKEDQDLLKLVKSYHWMGLVHIPTNGSWQWEDGSILSPNLLTIIEMQKGDCALYASSFKGYIENCSTPNTYICMQRTVSDPTRVETATETAWISLVTALHLVLGLSAVLGLLLLRWQFPAHYRRLRHALWPSLPDLHRVLGQYLRDTAALSPPKATVSDTCEEVEPSLLEILPKSSERTPLPLLELGPWSPEVPSTLEVYSCHPPRSPAKRLQLTELQEPAELVESDGVPKPSFWPTAQNSGGSAYSEERDRPYGLVSIDTVTVLDAEGPCTWPCSCEDDGYPALDLDAGLEPSEKQASSFDFNGPYLGPPHSRSLPDILGQPEPPQEGGSQKSPPPGSLEYLCLPAGGQVQLVPLAQDTEDPGVASGYVSSADLVFTPNSGASSVSGPPGAPGPVKSGFEGYVELPPIEGRSPRSQPEGLLVLQQVGDYCFLPGLGPGPLSLRSKQVPVIQLFKALKQQDYLSLPPWEVNKPGEVC

SEQ ID NO: 108 - protein, 839 aa, Artificial Sequence
  BM NKG2D-IL-21R-2-IL-23R-2 amino acid sequence
MALPVTALLLPLALLLHAARPDVVMTQSPLSLPVTPGEPASISCRSSQSLVHSNANTYLHWYLQKPGQSPQLLIYKVSNRFSGVPDRFSGSGSGTDFTLKISRVEAEDVGVYYCSQNTHVPPTFGQGTKLEIKRGGGGSGGGGSGGGGSQVQLVQSGAEVKKPGASVKVSCKASGYTFTDYEMHWVRQAPGQGLEWMGALDPKTGDTAYSQKFKGRVTLTADESTSTAYMELSSLRSEDTAVYYCTRFYSYTYWGQGTLVTVSSTTTPAPRPPTPAPTIASQPLSLRPEACRPAAGGAVHTRGLDFACDIYIWAPLAGTCGVLLLSLVITLYCKRGRKKLLYIFKQPFMRPVQTTQEEDGCSCRFPEEEEGGCELRVKFSRSADAPAYKQGQNQLYNELNLGRREEYDVLDKRRGRDPEMGGKPRRKNPQEGLYNELQKDKMAEAYSEIGMKGERRRGKGHDGLYQGLSTATKDTYDALHMQALPPRGSGATNFSLLKQAGDVEENPGPMALPVTALLLPLALLLHAARPSLFNQEVQIPLTESYCGPCPKNWICYKNNCYQFFDESKNWYESQASCMSQNASLLKVYSKEDQDLLKLVKSYHWMGLVHIPTNGSWQWEDGSILSPNLLTIIEMQKGDCALYASSFKGYIENCSTPNTYICMQRTVSDPTRVETATETAWISLVTALHLVLGLSAVLGLLLLRWQFPAHYRRLRHALWPSLPDLHRVLGQYLRDTAALSPPKATVSDTCEEVEPSLLEILPKSSERTPLPLECDFTSPGDEGPPRSYLRQWVVIPPPLSSPGPQASEFVSCLGIVNEELPSINTYFPQNILESHFNRIS

SEQ ID NO: 109 - protein, 836 aa, Artificial Sequence
  BM NKG2D-IL-21R-2-GM-CSFRalpha amino acid sequence
MALPVTALLLPLALLLHAARPDVVMTQSPLSLPVTPGEPASISCRSSQSLVHSNANTYLHWYLQKPGQSPQLLIYKVSNRFSGVPDRFSGSGSGTDFTLKISRVEAEDVGVYYCSQNTHVPPTFGQGTKLEIKRGGGGSGGGGSGGGGSQVQLVQSGAEVKKPGASVKVSCKASGYTFTDYEMHWVRQAPGQGLEWMGALDPKTGDTAYSQKFKGRVTLTADESTSTAYMELSSLRSEDTAVYYCTRFYSYTYWGQGTLVTVSSTTTPAPRPPTPAPTIASQPLSLRPEACRPAAGGAVHTRGLDFACDIYIWAPLAGTCGVLLLSLVITLYCKRGRKKLLYIFKQPFMRPVQTTQEEDGCSCRFPEEEEGGCELRVKFSRSADAPAYKQGQNQLYNELNLGRREEYDVLDKRRGRDPEMGGKPRRKNPQEGLYNELQKDKMAEAYSEIGMKGERRRGKGHDGLYQGLSTATKDTYDALHMQALPPRGSGATNFSLLKQAGDVEENPGPMALPVTALLLPLALLLHAARPSLFNQEVQIPLTESYCGPCPKNWICYKNNCYQFFDESKNWYESQASCMSQNASLLKVYSKEDQDLLKLVKSYHWMGLVHIPTNGSWQWEDGSILSPNLLTIIEMQKGDCALYASSFKGYIENCSTPNTYICMQRTVSDPTRVETATETAWISLVTALHLVLGLSAVLGLLLLRWQFPAHYRRLRHALWPSLPDLHRVLGQYLRDTAALSPPKATVSDTCEEVEPSLLEILPKSSERTPLPLECDFTSPGDEGPPRSYLRQWVVIPPPLSSPGPQASEVEDEIIWEEFTPEEGKGYREEVLTVKEIT

SEQ ID NO: 110 - protein, 925 aa, Artificial Sequence
  BM NKG2D-IL-21R-2-GM-CSFRbeta-1 amino acid sequence
MALPVTALLLPLALLLHAARPDVVMTQSPLSLPVTPGEPASISCRSSQSLVHSNANTYLHWYLQKPGQSPQLLIYKVSNRFSGVPDRFSGSGSGTDFTLKISRVEAEDVGVYYCSQNTHVPPTFGQGTKLEIKRGGGGSGGGGSGGGGSQVQLVQSGAEVKKPGASVKVSCKASGYTFTDYEMHWVRQAPGQGLEWMGALDPKTGDTAYSQKFKGRVTLTADESTSTAYMELSSLRSEDTAVYYCTRFYSYTYWGQGTLVTVSSTTTPAPRPPTPAPTIASQPLSLRPEACRPAAGGAVHTRGLDFACDIYIWAPLAGTCGVLLLSLVITLYCKRGRKKLLYIFKQPFMRPVQTTQEEDGCSCRFPEEEEGGCELRVKFSRSADAPAYKQGQNQLYNELNLGRREEYDVLDKRRGRDPEMGGKPRRKNPQEGLYNELQKDKMAEAYSEIGMKGERRRGKGHDGLYQGLSTATKDTYDALHMQALPPRGSGATNFSLLKQAGDVEENPGPMALPVTALLLPLALLLHAARPSLFNQEVQIPLTESYCGPCPKNWICYKNNCYQFFDESKNWYESQASCMSQNASLLKVYSKEDQDLLKLVKSYHWMGLVHIPTNGSWQWEDGSILSPNLLTIIEMQKGDCALYASSFKGYIENCSTPNTYICMQRTVSDPTRVETATETAWISLVTALHLVLGLSAVLGLLLLRWQFPAHYRRLRHALWPSLPDLHRVLGQYLRDTAALSPPKATVSDTCEEVEPSLLEILPKSSERTPLPLECDFTSPGDEGPPRSYLRQWVVIPPPLSSPGPQASDTEDPGVASGYVSSADLVFTPNSGASSVSGPPGAPGPVKSGFEGYVELPPIEGRSPRSQPEGLLVLQQVGDYCFLPGLGPGPLSLRSKQVPVIQLFKALKQQDYLSLPPWEVNKPGEVC

SEQ ID NO: 111 - protein, 989 aa, Artificial Sequence
  BM NKG2D-IL-21R-2-GM-CSFRbeta-2 amino acid sequence
MALPVTALLLPLALLLHAARPDVVMTQSPLSLPVTPGEPASISCRSSQSLVHSNANTYLHWYLQKPGQSPQLLIYKVSNRFSGVPDRFSGSGSGTDFTLKISRVEAEDVGVYYCSQNTHVPPTFGQGTKLEIKRGGGGSGGGGSGGGGSQVQLVQSGAEVKKPGASVKVSCKASGYTFTDYEMHWVRQAPGQGLEWMGALDPKTGDTAYSQKFKGRVTLTADESTSTAYMELSSLRSEDTAVYYCTRFYSYTYWGQGTLVTVSSTTTPAPRPPTPAPTIASQPLSLRPEACRPAAGGAVHTRGLDFACDIYIWAPLAGTCGVLLLSLVITLYCKRGRKKLLYIFKQPFMRPVQTTQEEDGCSCRFPEEEEGGCELRVKFSRSADAPAYKQGQNQLYNELNLGRREEYDVLDKRRGRDPEMGGKPRRKNPQEGLYNELQKDKMAEAYSEIGMKGERRRGKGHDGLYQGLSTATKDTYDALHMQALPPRGSGATNFSLLKQAGDVEENPGPMALPVTALLLPLALLLHAARPSLFNQEVQIPLTESYCGPCPKNWICYKNNCYQFFDESKNWYESQASCMSQNASLLKVYSKEDQDLLKLVKSYHWMGLVHIPTNGSWQWEDGSILSPNLLTIIEMQKGDCALYASSFKGYIENCSTPNTYICMQRTVSDPTRVETATETAWISLVTALHLVLGLSAVLGLLLLRWQFPAHYRRLRHALWPSLPDLHRVLGQYLRDTAALSPPKATVSDTCEEVEPSLLEILPKSSERTPLPLECDFTSPGDEGPPRSYLRQWVVIPPPLSSPGPQASEKQASSFDFNGPYLGPPHSRSLPDILGQPEPPQEGGSQKSPPPGSLEYLCLPAGGQVQLVPLAQDTEDPGVASGYVSSADLVFTPNSGASSVSGPPGAPGPVKSGFEGYVELPPIEGRSPRSQPEGLLVLQQVGDYCFLPGLGPGPLSLRSKQVPVIQLFKALKQQDYLSLPPWEVNKPGEVC

SEQ ID NO: 112 - protein, 950 aa, Artificial Sequence
  BM NKG2D-IL-21R-3-IL-23R-2 amino acid sequence
MALPVTALLLPLALLLHAARPDVVMTQSPLSLPVTPGEPASISCRSSQSLVHSNANTYLHWYLQKPGQSPQLLIYKVSNRFSGVPDRFSGSGSGTDFTLKISRVEAEDVGVYYCSQNTHVPPTFGQGTKLEIKRGGGGSGGGGSGGGGSQVQLVQSGAEVKKPGASVKVSCKASGYTFTDYEMHWVRQAPGQGLEWMGALDPKTGDTAYSQKFKGRVTLTADESTSTAYMELSSLRSEDTAVYYCTRFYSYTYWGQGTLVTVSSTTTPAPRPPTPAPTIASQPLSLRPEACRPAAGGAVHTRGLDFACDIYIWAPLAGTCGVLLLSLVITLYCKRGRKKLLYIFKQPFMRPVQTTQEEDGCSCRFPEEEEGGCELRVKFSRSADAPAYKQGQNQLYNELNLGRREEYDVLDKRRGRDPEMGGKPRRKNPQEGLYNELQKDKMAEAYSEIGMKGERRRGKGHDGLYQGLSTATKDTYDALHMQALPPRGSGATNFSLLKQAGDVEENPGPMALPVTALLLPLALLLHAARPSLFNQEVQIPLTESYCGPCPKNWICYKNNCYQFFDESKNWYESQASCMSQNASLLKVYSKEDQDLLKLVKSYHWMGLVHIPTNGSWQWEDGSILSPNLLTIIEMQKGDCALYASSFKGYIENCSTPNTYICMQRTVSDPTRVETATETAWISLVTALHLVLGLSAVLGLLLLRWQFPAHYRRLRHALWPSLPDLHRVLGQYLRDTAALSPPKATVSDTCEEVEPSLLEILPKSSERTPLPLLELGPWSPEVPSTLEVYSCHPPRSPAKRLQLTELQEPAELVESDGVPKPSFWPTAQNSGGSAYSEERDRPYGLVSIDTVTVLDAEGPCTWPCSCEDDGYPALDLDAGLEPSECDFTSPGDEGPPRSYLRQWVVIPPPLSSPGPQASEFVSCLGIVNEELPSINTYFPQNILESHFNRIS

SEQ ID NO: 113 - protein, 947 aa, Artificial Sequence
  BM NKG2D-IL-21R-3-GM-CSFRalpha amino acid sequence
MALPVTALLLPLALLLHAARPDVVMTQSPLSLPVTPGEPASISCRSSQSLVHSNANTYLHWYLQKPGQSPQLLIYKVSNRFSGVPDRFSGSGSGTDFTLKISRVEAEDVGVYYCSQNTHVPPTFGQGTKLEIKRGGGGSGGGGSGGGGSQVQLVQSGAEVKKPGASVKVSCKASGYTFTDYEMHWVRQAPGQGLEWMGALDPKTGDTAYSQKFKGRVTLTADESTSTAYMELSSLRSEDTAVYYCTRFYSYTYWGQGTLVTVSSTTTPAPRPPTPAPTIASQPLSLRPEACRPAAGGAVHTRGLDFACDIYIWAPLAGTCGVLLLSLVITLYCKRGRKKLLYIFKQPFMRPVQTTQEEDGCSCRFPEEEEGGCELRVKFSRSADAPAYKQGQNQLYNELNLGRREEYDVLDKRRGRDPEMGGKPRRKNPQEGLYNELQKDKMAEAYSEIGMKGERRRGKGHDGLYQGLSTATKDTYDALHMQALPPRGSGATNFSLLKQAGDVEENPGPMALPVTALLLPLALLLHAARPSLFNQEVQIPLTESYCGPCPKNWICYKNNCYQFFDESKNWYESQASCMSQNASLLKVYSKEDQDLLKLVKSYHWMGLVHIPTNGSWQWEDGSILSPNLLTIIEMQKGDCALYASSFKGYIENCSTPNTYICMQRTVSDPTRVETATETAWISLVTALHLVLGLSAVLGLLLLRWQFPAHYRRLRHALWPSLPDLHRVLGQYLRDTAALSPPKATVSDTCEEVEPSLLEILPKSSERTPLPLLELGPWSPEVPSTLEVYSCHPPRSPAKRLQLTELQEPAELVESDGVPKPSFWPTAQNSGGSAYSEERDRPYGLVSIDTVTVLDAEGPCTWPCSCEDDGYPALDLDAGLEPSECDFTSPGDEGPPRSYLRQWVVIPPPLSSPGPQASEVEDEIIWEEFTPEEGKGYREEVLTVKEIT

SEQ ID NO: 114 - protein, 1036 aa, Artificial Sequence
  BM NKG2D-IL-21R-3-GM-CSFRbeta-1 amino acid sequence
MALPVTALLLPLALLLHAARPDVVMTQSPLSLPVTPGEPASISCRSSQSLVHSNANTYLHWYLQKPGQSPQLLIYKVSNRFSGVPDRFSGSGSGTDFTLKISRVEAEDVGVYYCSQNTHVPPTFGQGTKLEIKRGGGGSGGGGSGGGGSQVQLVQSGAEVKKPGASVKVSCKASGYTFTDYEMHWVRQAPGQGLEWMGALDPKTGDTAYSQKFKGRVTLTADESTSTAYMELSSLRSEDTAVYYCTRFYSYTYWGQGTLVTVSSTTTPAPRPPTPAPTIASQPLSLRPEACRPAAGGAVHTRGLDFACDIYIWAPLAGTCGVLLLSLVITLYCKRGRKKLLYIFKQPFMRPVQTTQEEDGCSCRFPEEEEGGCELRVKFSRSADAPAYKQGQNQLYNELNLGRREEYDVLDKRRGRDPEMGGKPRRKNPQEGLYNELQKDKMAEAYSEIGMKGERRRGKGHDGLYQGLSTATKDTYDALHMQALPPRGSGATNFSLLKQAGDVEENPGPMALPVTALLLPLALLLHAARPSLFNQEVQIPLTESYCGPCPKNWICYKNNCYQFFDESKNWYESQASCMSQNASLLKVYSKEDQDLLKLVKSYHWMGLVHIPTNGSWQWEDGSILSPNLLTIIEMQKGDCALYASSFKGYIENCSTPNTYICMQRTVSDPTRVETATETAWISLVTALHLVLGLSAVLGLLLLRWQFPAHYRRLRHALWPSLPDLHRVLGQYLRDTAALSPPKATVSDTCEEVEPSLLEILPKSSERTPLPLLELGPWSPEVPSTLEVYSCHPPRSPAKRLQLTELQEPAELVESDGVPKPSFWPTAQNSGGSAYSEERDRPYGLVSIDTVTVLDAEGPCTWPCSCEDDGYPALDLDAGLEPSECDFTSPGDEGPPRSYLRQWVVIPPPLSSPGPQASDTEDPGVASGYVSSADLVFTPNSGASSVSGPPGAPGPVKSGFEGYVELPPIEGRSPRSQPEGLLVLQQVGDYCFLPGLGPGPLSLRSKQVPVIQLFKALKQQDYLSLPPWEVNKPGEVC

SEQ ID NO: 115 - protein, 1100 aa, Artificial Sequence
  BM NKG2D-IL-21R-3-GM-CSFRbeta-2 amino acid sequence
MALPVTALLLPLALLLHAARPDVVMTQSPLSLPVTPGEPASISCRSSQSLVHSNANTYLHWYLQKPGQSPQLLIYKVSNRFSGVPDRFSGSGSGTDFTLKISRVEAEDVGVYYCSQNTHVPPTFGQGTKLEIKRGGGGSGGGGSGGGGSQVQLVQSGAEVKKPGASVKVSCKASGYTFTDYEMHWVRQAPGQGLEWMGALDPKTGDTAYSQKFKGRVTLTADESTSTAYMELSSLRSEDTAVYYCTRFYSYTYWGQGTLVTVSSTTTPAPRPPTPAPTIASQPLSLRPEACRPAAGGAVHTRGLDFACDIYIWAPLAGTCGVLLLSLVITLYCKRGRKKLLYIFKQPFMRPVQTTQEEDGCSCRFPEEEEGGCELRVKFSRSADAPAYKQGQNQLYNELNLGRREEYDVLDKRRGRDPEMGGKPRRKNPQEGLYNELQKDKMAEAYSEIGMKGERRRGKGHDGLYQGLSTATKDTYDALHMQALPPRGSGATNFSLLKQAGDVEENPGPMALPVTALLLPLALLLHAARPSLFNQEVQIPLTESYCGPCPKNWICYKNNCYQFFDESKNWYESQASCMSQNASLLKVYSKEDQDLLKLVKSYHWMGLVHIPTNGSWQWEDGSILSPNLLTIIEMQKGDCALYASSFKGYIENCSTPNTYICMQRTVSDPTRVETATETAWISLVTALHLVLGLSAVLGLLLLRWQFPAHYRRLRHALWPSLPDLHRVLGQYLRDTAALSPPKATVSDTCEEVEPSLLEILPKSSERTPLPLLELGPWSPEVPSTLEVYSCHPPRSPAKRLQLTELQEPAELVESDGVPKPSFWPTAQNSGGSAYSEERDRPYGLVSIDTVTVLDAEGPCTWPCSCEDDGYPALDLDAGLEPSECDFTSPGDEGPPRSYLRQWVVIPPPLSSPGPQASEKQASSFDFNGPYLGPPHSRSLPDILGQPEPPQEGGSQKSPPPGSLEYLCLPAGGQVQLVPLAQDTEDPGVASGYVSSADLVFTPNSGASSVSGPPGAPGPVKSGFEGYVELPPIEGRSPRSQPEGLLVLQQVGDYCFLPGLGPGPLSLRSKQVPVIQLFKALKQQDYLSLPPWEVNKPGEVC

SEQ ID NO: 116 - protein, 834 aa, Artificial Sequence
  BM NKG2D-IL-23R-2-GM-CSFRalpha amino acid sequence
MALPVTALLLPLALLLHAARPDVVMTQSPLSLPVTPGEPASISCRSSQSLVHSNANTYLHWYLQKPGQSPQLLIYKVSNRFSGVPDRFSGSGSGTDFTLKISRVEAEDVGVYYCSQNTHVPPTFGQGTKLEIKRGGGGSGGGGSGGGGSQVQLVQSGAEVKKPGASVKVSCKASGYTFTDYEMHWVRQAPGQGLEWMGALDPKTGDTAYSQKFKGRVTLTADESTSTAYMELSSLRSEDTAVYYCTRFYSYTYWGQGTLVTVSSTTTPAPRPPTPAPTIASQPLSLRPEACRPAAGGAVHTRGLDFACDIYIWAPLAGTCGVLLLSLVITLYCKRGRKKLLYIFKQPFMRPVQTTQEEDGCSCRFPEEEEGGCELRVKFSRSADAPAYKQGQNQLYNELNLGRREEYDVLDKRRGRDPEMGGKPRRKNPQEGLYNELQKDKMAEAYSEIGMKGERRRGKGHDGLYQGLSTATKDTYDALHMQALPPRGSGATNFSLLKQAGDVEENPGPMALPVTALLLPLALLLHAARPSLFNQEVQIPLTESYCGPCPKNWICYKNNCYQFFDESKNWYESQASCMSQNASLLKVYSKEDQDLLKLVKSYHWMGLVHIPTNGSWQWEDGSILSPNLLTIIEMQKGDCALYASSFKGYIENCSTPNTYICMQRTVSDPTRVETATETAWISLVTALHLVLGLSAVLGLLLLRWQFPAHYRRLRHALWPSLPDLHRVLGQYLRDTAALSPPKATVSDTCEEVEPSLLEILPKSSERTPLPLEFVSCLGIVNEELPSINTYFPQNILESHFNRISEVEDEIIWEEFTPEEGKGYREEVLTVKEIT

SEQ ID NO: 117 - protein, 923 aa, Artificial Sequence
  BM NKG2D-IL-23R-2-GM-CSFRbeta-1 amino acid sequence
MALPVTALLLPLALLLHAARPDVVMTQSPLSLPVTPGEPASISCRSSQSLVHSNANTYLHWYLQKPGQSPQLLIYKVSNRFSGVPDRFSGSGSGTDFTLKISRVEAEDVGVYYCSQNTHVPPTFGQGTKLEIKRGGGGSGGGGSGGGGSQVQLVQSGAEVKKPGASVKVSCKASGYTFTDYEMHWVRQAPGQGLEWMGALDPKTGDTAYSQKFKGRVTLTADESTSTAYMELSSLRSEDTAVYYCTRFYSYTYWGQGTLVTVSSTTTPAPRPPTPAPTIASQPLSLRPEACRPAAGGAVHTRGLDFACDIYIWAPLAGTCGVLLLSLVITLYCKRGRKKLLYIFKQPFMRPVQTTQEEDGCSCRFPEEEEGGCELRVKFSRSADAPAYKQGQNQLYNELNLGRREEYDVLDKRRGRDPEMGGKPRRKNPQEGLYNELQKDKMAEAYSEIGMKGERRRGKGHDGLYQGLSTATKDTYDALHMQALPPRGSGATNFSLLKQAGDVEENPGPMALPVTALLLPLALLLHAARPSLFNQEVQIPLTESYCGPCPKNWICYKNNCYQFFDESKNWYESQASCMSQNASLLKVYSKEDQDLLKLVKSYHWMGLVHIPTNGSWQWEDGSILSPNLLTIIEMQKGDCALYASSFKGYIENCSTPNTYICMQRTVSDPTRVETATETAWISLVTALHLVLGLSAVLGLLLLRWQFPAHYRRLRHALWPSLPDLHRVLGQYLRDTAALSPPKATVSDTCEEVEPSLLEILPKSSERTPLPLEFVSCLGIVNEELPSINTYFPQNILESHFNRISDTEDPGVASGYVSSADLVFTPNSGASSVSGPPGAPGPVKSGFEGYVELPPIEGRSPRSQPEGLLVLQQVGDYCFLPGLGPGPLSLRSKQVPVIQLFKALKQQDYLSLPPWEVNKPGEVC

SEQ ID NO: 118 - protein, 987 aa, Artificial Sequence
  BM NKG2D-IL-23R-2-GM-CSFRbeta-2 amino acid sequence
MALPVTALLLPLALLLHAARPDVVMTQSPLSLPVTPGEPASISCRSSQSLVHSNANTYLHWYLQKPGQSPQLLIYKVSNRFSGVPDRFSGSGSGTDFTLKISRVEAEDVGVYYCSQNTHVPPTFGQGTKLEIKRGGGGSGGGGSGGGGSQVQLVQSGAEVKKPGASVKVSCKASGYTFTDYEMHWVRQAPGQGLEWMGALDPKTGDTAYSQKFKGRVTLTADESTSTAYMELSSLRSEDTAVYYCTRFYSYTYWGQGTLVTVSSTTTPAPRPPTPAPTIASQPLSLRPEACRPAAGGAVHTRGLDFACDIYIWAPLAGTCGVLLLSLVITLYCKRGRKKLLYIFKQPFMRPVQTTQEEDGCSCRFPEEEEGGCELRVKFSRSADAPAYKQGQNQLYNELNLGRREEYDVLDKRRGRDPEMGGKPRRKNPQEGLYNELQKDKMAEAYSEIGMKGERRRGKGHDGLYQGLSTATKDTYDALHMQALPPRGSGATNFSLLKQAGDVEENPGPMALPVTALLLPLALLLHAARPSLFNQEVQIPLTESYCGPCPKNWICYKNNCYQFFDESKNWYESQASCMSQNASLLKVYSKEDQDLLKLVKSYHWMGLVHIPTNGSWQWEDGSILSPNLLTIIEMQKGDCALYASSFKGYIENCSTPNTYICMQRTVSDPTRVETATETAWISLVTALHLVLGLSAVLGLLLLRWQFPAHYRRLRHALWPSLPDLHRVLGQYLRDTAALSPPKATVSDTCEEVEPSLLEILPKSSERTPLPLEFVSCLGIVNEELPSINTYFPQNILESHFNRISEKQASSFDFNGPYLGPPHSRSLPDILGQPEPPQEGGSQKSPPPGSLEYLCLPAGGQVQLVPLAQDTEDPGVASGYVSSADLVFTPNSGASSVSGPPGAPGPVKSGFEGYVELPPIEGRSPRSQPEGLLVLQQVGDYCFLPGLGPGPLSLRSKQVPVIQLFKALKQQDYLSLPPWEVNKPGEVC

SEQ ID NO: 119 - protein, 989 aa, Artificial Sequence
  BM NKG2D-IL-7Ralpha-IL-9R-2 amino acid sequence
MALPVTALLLPLALLLHAARPDVVMTQSPLSLPVTPGEPASISCRSSQSLVHSNANTYLHWYLQKPGQSPQLLIYKVSNRFSGVPDRFSGSGSGTDFTLKISRVEAEDVGVYYCSQNTHVPPTFGQGTKLEIKRGGGGSGGGGSGGGGSQVQLVQSGAEVKKPGASVKVSCKASGYTFTDYEMHWVRQAPGQGLEWMGALDPKTGDTAYSQKFKGRVTLTADESTSTAYMELSSLRSEDTAVYYCTRFYSYTYWGQGTLVTVSSTTTPAPRPPTPAPTIASQPLSLRPEACRPAAGGAVHTRGLDFACDIYIWAPLAGTCGVLLLSLVITLYCKRGRKKLLYIFKQPFMRPVQTTQEEDGCSCRFPEEEEGGCELRVKFSRSADAPAYKQGQNQLYNELNLGRREEYDVLDKRRGRDPEMGGKPRRKNPQEGLYNELQKDKMAEAYSEIGMKGERRRGKGHDGLYQGLSTATKDTYDALHMQALPPRGSGATNFSLLKQAGDVEENPGPMALPVTALLLPLALLLHAARPSLFNQEVQIPLTESYCGPCPKNWICYKNNCYQFFDESKNWYESQASCMSQNASLLKVYSKEDQDLLKLVKSYHWMGLVHIPTNGSWQWEDGSILSPNLLTIIEMQKGDCALYASSFKGYIENCSTPNTYICMQRTVSDPTRVETATETAWISLVTALHLVLGLSAVLGLLLLRWQFPAHYRRLRHALWPSLPDLHRVLGQYLRDTAALSPPKATVSDTCEEVEPSLLEILPKSSERTPLPLARDEVEGFLQDTFPQQLEESEKQRLGGDVQSPNCPSEDVVITPESFGRDSSLTCLAGNVSACDAPILSSSRSLDCRESGKNGPHVYQDLLLSLGTTNSTLPPPFSLQSGILTLNPVAQGQPILTSLGSNQEEAYVTMSSFYQNQDVLPAGCTEWRVQTLAYLPQEDWAPTSLTRPAPPDSEGSRSSSSSSSSNNNNYCALGCYGGWHLSALPGNTQSS

SEQ ID NO: 120 - protein, 896 aa, Artificial Sequence
  BM NKG2D-IL12Rbeta1-IL-9R-2 amino acid sequence
MALPVTALLLPLALLLHAARPDVVMTQSPLSLPVTPGEPASISCRSSQSLVHSNANTYLHWYLQKPGQSPQLLIYKVSNRFSGVPDRFSGSGSGTDFTLKISRVEAEDVGVYYCSQNTHVPPTFGQGTKLEIKRGGGGSGGGGSGGGGSQVQLVQSGAEVKKPGASVKVSCKASGYTFTDYEMHWVRQAPGQGLEWMGALDPKTGDTAYSQKFKGRVTLTADESTSTAYMELSSLRSEDTAVYYCTRFYSYTYWGQGTLVTVSSTTTPAPRPPTPAPTIASQPLSLRPEACRPAAGGAVHTRGLDFACDIYIWAPLAGTCGVLLLSLVITLYCKRGRKKLLYIFKQPFMRPVQTTQEEDGCSCRFPEEEEGGCELRVKFSRSADAPAYKQGQNQLYNELNLGRREEYDVLDKRRGRDPEMGGKPRRKNPQEGLYNELQKDKMAEAYSEIGMKGERRRGKGHDGLYQGLSTATKDTYDALHMQALPPRGSGATNFSLLKQAGDVEENPGPMALPVTALLLPLALLLHAARPSLFNQEVQIPLTESYCGPCPKNWICYKNNCYQFFDESKNWYESQASCMSQNASLLKVYSKEDQDLLKLVKSYHWMGLVHIPTNGSWQWEDGSILSPNLLTIIEMQKGDCALYASSFKGYIENCSTPNTYICMQRTVSDPTRVETATETAWISLVTALHLVLGLSAVLGLLLLRWQFPAHYRRLRHALWPSLPDLHRVLGQYLRDTAALSPPKATVSDTCEEVEPSLLEILPKSSERTPLPLSLQEALVVEMSWDKGERTEPLEKTELPEGAPELALDTELSLEDGDRCKAKMDVLPAGCTEWRVQTLAYLPQEDWAPTSLTRPAPPDSEGSRSSSSSSSSNNNNYCALGCYGGWHLSALPGNTQSS

SEQ ID NO: 121 - protein, 896 aa, Artificial Sequence
  BM NKG2D-IL12Rbeta2-IL-9R-2 amino acid sequence
MALPVTALLLPLALLLHAARPDVVMTQSPLSLPVTPGEPASISCRSSQSLVHSNANTYLHWYLQKPGQSPQLLIYKVSNRFSGVPDRFSGSGSGTDFTLKISRVEAEDVGVYYCSQNTHVPPTFGQGTKLEIKRGGGGSGGGGSGGGGSQVQLVQSGAEVKKPGASVKVSCKASGYTFTDYEMHWVRQAPGQGLEWMGALDPKTGDTAYSQKFKGRVTLTADESTSTAYMELSSLRSEDTAVYYCTRFYSYTYWGQGTLVTVSSTTTPAPRPPTPAPTIASQPLSLRPEACRPAAGGAVHTRGLDFACDIYIWAPLAGTCGVLLLSLVITLYCKRGRKKLLYIFKQPFMRPVQTTQEEDGCSCRFPEEEEGGCELRVKFSRSADAPAYKQGQNQLYNELNLGRREEYDVLDKRRGRDPEMGGKPRRKNPQEGLYNELQKDKMAEAYSEIGMKGERRRGKGHDGLYQGLSTATKDTYDALHMQALPPRGSGATNFSLLKQAGDVEENPGPMALPVTALLLPLALLLHAARPSLFNQEVQIPLTESYCGPCPKNWICYKNNCYQFFDESKNWYESQASCMSQNASLLKVYSKEDQDLLKLVKSYHWMGLVHIPTNGSWQWEDGSILSPNLLTIIEMQKGDCALYASSFKGYIENCSTPNTYICMQRTVSDPTRVETATETAWISLVTALHLVLGLSAVLGLLLLRWQFPAHYRRLRHALWPSLPDLHRVLGQYLRDTAALSPPKATVSDTCEEVEPSLLEILPKSSERTPLPLSDPKPENPACPWTVLPAGDLPTHDGYLPSNIDDLPSHEAPLADSLEELEPQDVLPAGCTEWRVQTLAYLPQEDWAPTSLTRPAPPDSEGSRSSSSSSSSNNNNYCALGCYGGWHLSALPGNTQSS

SEQ ID NO: 122 - protein, 884 aa, Artificial Sequence
  BM NKG2D-IL15Ralpha-IL-9R-2 amino acid sequence
MALPVTALLLPLALLLHAARPDVVMTQSPLSLPVTPGEPASISCRSSQSLVHSNANTYLHWYLQKPGQSPQLLIYKVSNRFSGVPDRFSGSGSGTDFTLKISRVEAEDVGVYYCSQNTHVPPTFGQGTKLEIKRGGGGSGGGGSGGGGSQVQLVQSGAEVKKPGASVKVSCKASGYTFTDYEMHWVRQAPGQGLEWMGALDPKTGDTAYSQKFKGRVTLTADESTSTAYMELSSLRSEDTAVYYCTRFYSYTYWGQGTLVTVSSTTTPAPRPPTPAPTIASQPLSLRPEACRPAAGGAVHTRGLDFACDIYIWAPLAGTCGVLLLSLVITLYCKRGRKKLLYIFKQPFMRPVQTTQEEDGCSCRFPEEEEGGCELRVKFSRSADAPAYKQGQNQLYNELNLGRREEYDVLDKRRGRDPEMGGKPRRKNPQEGLYNELQKDKMAEAYSEIGMKGERRRGKGHDGLYQGLSTATKDTYDALHMQALPPRGSGATNFSLLKQAGDVEENPGPMALPVTALLLPLALLLHAARPSLFNQEVQIPLTESYCGPCPKNWICYKNNCYQFFDESKNWYESQASCMSQNASLLKVYSKEDQDLLKLVKSYHWMGLVHIPTNGSWQWEDGSILSPNLLTIIEMQKGDCALYASSFKGYIENCSTPNTYICMQRTVSDPTRVETATETAWISLVTALHLVLGLSAVLGLLLLRWQFPAHYRRLRHALWPSLPDLHRVLGQYLRDTAALSPPKATVSDTCEEVEPSLLEILPKSSERTPLPLKSRQTPPLASVEMEAMEALPVTWGTSSRDEDLENCSHHLDVLPAGCTEWRVQTLAYLPQEDWAPTSLTRPAPPDSEGSRSSSSSSSSNNNNYCALGCYGGWHLSALPGNTQSS

SEQ ID NO: 123 - protein, 1064 aa, Artificial Sequence
  BM NKG2D-IL15Rbeta-1-IL-9R-2 amino acid sequence
MALPVTALLLPLALLLHAARPDVVMTQSPLSLPVTPGEPASISCRSSQSLVHSNANTYLHWYLQKPGQSPQLLIYKVSNRFSGVPDRFSGSGSGTDFTLKISRVEAEDVGVYYCSQNTHVPPTFGQGTKLEIKRGGGGSGGGGSGGGGSQVQLVQSGAEVKKPGASVKVSCKASGYTFTDYEMHWVRQAPGQGLEWMGALDPKTGDTAYSQKFKGRVTLTADESTSTAYMELSSLRSEDTAVYYCTRFYSYTYWGQGTLVTVSSTTTPAPRPPTPAPTIASQPLSLRPEACRPAAGGAVHTRGLDFACDIYIWAPLAGTCGVLLLSLVITLYCKRGRKKLLYIFKQPFMRPVQTTQEEDGCSCRFPEEEEGGCELRVKFSRSADAPAYKQGQNQLYNELNLGRREEYDVLDKRRGRDPEMGGKPRRKNPQEGLYNELQKDKMAEAYSEIGMKGERRRGKGHDGLYQGLSTATKDTYDALHMQALPPRGSGATNFSLLKQAGDVEENPGPMALPVTALLLPLALLLHAARPSLFNQEVQIPLTESYCGPCPKNWICYKNNCYQFFDESKNWYESQASCMSQNASLLKVYSKEDQDLLKLVKSYHWMGLVHIPTNGSWQWEDGSILSPNLLTIIEMQKGDCALYASSFKGYIENCSTPNTYICMQRTVSDPTRVETATETAWISLVTALHLVLGLSAVLGLLLLRWQFPAHYRRLRHALWPSLPDLHRVLGQYLRDTAALSPPKATVSDTCEEVEPSLLEILPKSSERTPLPLVTQLLLQQDKVPEPASLSSNHSLTSCFTNQGYFFFHLPDALEIEACQVYFTYDPYSEEDPDEGVAGAPTGSSPQPLQPLSGEDDAYCTFPSRDDLLLFSPSLLGGPSPPSTAPGGSGAGEERMPPSLQERVPRDWDPQPLGPPTPGVPDLVDFQPPPELVLREAGEEVPDAGPREGVSFPWSRPPGQGEFRALNARLPLNTDAYLSLQELQGQDPTHLVDVLPAGCTEWRVQTLAYLPQEDWAPTSLTRPAPPDSEGSRSSSSSSSSNNNNYCALGCYGGWHLSALPGNTQSS

SEQ ID NO: 124 - protein, 963 aa, Artificial Sequence
  BM NKG2D-IL15Rbeta-2-IL-9R-2 amino acid sequence
MALPVTALLLPLALLLHAARPDVVMTQSPLSLPVTPGEPASISCRSSQSLVHSNANTYLHWYLQKPGQSPQLLIYKVSNRFSGVPDRFSGSGSGTDFTLKISRVEAEDVGVYYCSQNTHVPPTFGQGTKLEIKRGGGGSGGGGSGGGGSQVQLVQSGAEVKKPGASVKVSCKASGYTFTDYEMHWVRQAPGQGLEWMGALDPKTGDTAYSQKFKGRVTLTADESTSTAYMELSSLRSEDTAVYYCTRFYSYTYWGQGTLVTVSSTTTPAPRPPTPAPTIASQPLSLRPEACRPAAGGAVHTRGLDFACDIYIWAPLAGTCGVLLLSLVITLYCKRGRKKLLYIFKQPFMRPVQTTQEEDGCSCRFPEEEEGGCELRVKFSRSADAPAYKQGQNQLYNELNLGRREEYDVLDKRRGRDPEMGGKPRRKNPQEGLYNELQKDKMAEAYSEIGMKGERRRGKGHDGLYQGLSTATKDTYDALHMQALPPRGSGATNFSLLKQAGDVEENPGPMALPVTALLLPLALLLHAARPSLFNQEVQIPLTESYCGPCPKNWICYKNNCYQFFDESKNWYESQASCMSQNASLLKVYSKEDQDLLKLVKSYHWMGLVHIPTNGSWQWEDGSILSPNLLTIIEMQKGDCALYASSFKGYIENCSTPNTYICMQRTVSDPTRVETATETAWISLVTALHLVLGLSAVLGLLLLRWQFPAHYRRLRHALWPSLPDLHRVLGQYLRDTAALSPPKATVSDTCEEVEPSLLEILPKSSERTPLPLEPASLSSNHSLTSCFTNQGYFFFHLPDALEIEACQVYFTYDPYSEEDPDEGVAGAPTGSSPQPLQPLSGEDDAYCTFPSRDDLLLFSEFRALNARLPLNTDAYLSLQELQGQDPTHLVDVLPAGCTEWRVQTLAYLPQEDWAPTSLTRPAPPDSEGSRSSSSSSSSNNNNYCALGCYGGWHLSALPGNTQSS

SEQ ID NO: 125 - protein, 956 aa, Artificial Sequence
  BM NKG2D-IL-21R-1-IL-9R-2 amino acid sequence
MALPVTALLLPLALLLHAARPDVVMTQSPLSLPVTPGEPASISCRSSQSLVHSNANTYLHWYLQKPGQSPQLLIYKVSNRFSGVPDRFSGSGSGTDFTLKISRVEAEDVGVYYCSQNTHVPPTFGQGTKLEIKRGGGGSGGGGSGGGGSQVQLVQSGAEVKKPGASVKVSCKASGYTFTDYEMHWVRQAPGQGLEWMGALDPKTGDTAYSQKFKGRVTLTADESTSTAYMELSSLRSEDTAVYYCTRFYSYTYWGQGTLVTVSSTTTPAPRPPTPAPTIASQPLSLRPEACRPAAGGAVHTRGLDFACDIYIWAPLAGTCGVLLLSLVITLYCKRGRKKLLYIFKQPFMRPVQTTQEEDGCSCRFPEEEEGGCELRVKFSRSADAPAYKQGQNQLYNELNLGRREEYDVLDKRRGRDPEMGGKPRRKNPQEGLYNELQKDKMAEAYSEIGMKGERRRGKGHDGLYQGLSTATKDTYDALHMQALPPRGSGATNFSLLKQAGDVEENPGPMALPVTALLLPLALLLHAARPSLFNQEVQIPLTESYCGPCPKNWICYKNNCYQFFDESKNWYESQASCMSQNASLLKVYSKEDQDLLKLVKSYHWMGLVHIPTNGSWQWEDGSILSPNLLTIIEMQKGDCALYASSFKGYIENCSTPNTYICMQRTVSDPTRVETATETAWISLVTALHLVLGLSAVLGLLLLRWQFPAHYRRLRHALWPSLPDLHRVLGQYLRDTAALSPPKATVSDTCEEVEPSLLEILPKSSERTPLPLLELGPWSPEVPSTLEVYSCHPPRSPAKRLQLTELQEPAELVESDGVPKPSFWPTAQNSGGSAYSEERDRPYGLVSIDTVTVLDAEGPCTWPCSCEDDGYPALDLDAGLEPSDVLPAGCTEWRVQTLAYLPQEDWAPTSLTRPAPPDSEGSRSSSSSSSSNNNNYCALGCYGGWHLSALPGNTQSS

SEQ ID NO: 126 - protein, 880 aa, Artificial Sequence
  BM NKG2D-IL-21R-2-IL-9R-2 amino acid sequence
MALPVTALLLPLALLLHAARPDVVMTQSPLSLPVTPGEPASISCRSSQSLVHSNANTYLHWYLQKPGQSPQLLIYKVSNRFSGVPDRFSGSGSGTDFTLKISRVEAEDVGVYYCSQNTHVPPTFGQGTKLEIKRGGGGSGGGGSGGGGSQVQLVQSGAEVKKPGASVKVSCKASGYTFTDYEMHWVRQAPGQGLEWMGALDPKTGDTAYSQKFKGRVTLTADESTSTAYMELSSLRSEDTAVYYCTRFYSYTYWGQGTLVTVSSTTTPAPRPPTPAPTIASQPLSLRPEACRPAAGGAVHTRGLDFACDIYIWAPLAGTCGVLLLSLVITLYCKRGRKKLLYIFKQPFMRPVQTTQEEDGCSCRFPEEEEGGCELRVKFSRSADAPAYKQGQNQLYNELNLGRREEYDVLDKRRGRDPEMGGKPRRKNPQEGLYNELQKDKMAEAYSEIGMKGERRRGKGHDGLYQGLSTATKDTYDALHMQALPPRGSGATNFSLLKQAGDVEENPGPMALPVTALLLPLALLLHAARPSLFNQEVQIPLTESYCGPCPKNWICYKNNCYQFFDESKNWYESQASCMSQNASLLKVYSKEDQDLLKLVKSYHWMGLVHIPTNGSWQWEDGSILSPNLLTIIEMQKGDCALYASSFKGYIENCSTPNTYICMQRTVSDPTRVETATETAWISLVTALHLVLGLSAVLGLLLLRWQFPAHYRRLRHALWPSLPDLHRVLGQYLRDTAALSPPKATVSDTCEEVEPSLLEILPKSSERTPLPLECDFTSPGDEGPPRSYLRQWVVIPPPLSSPGPQASDVLPAGCTEWRVQTLAYLPQEDWAPTSLTRPAPPDSEGSRSSSSSSSSNNNNYCALGCYGGWHLSALPGNTQSS

SEQ ID NO: 127 - protein, 991 aa, Artificial Sequence
  BM NKG2D-IL-21R-3-IL-9R-2 amino acid sequence
MALPVTALLLPLALLLHAARPDVVMTQSPLSLPVTPGEPASISCRSSQSLVHSNANTYLHWYLQKPGQSPQLLIYKVSNRFSGVPDRFSGSGSGTDFTLKISRVEAEDVGVYYCSQNTHVPPTFGQGTKLEIKRGGGGSGGGGSGGGGSQVQLVQSGAEVKKPGASVKVSCKASGYTFTDYEMHWVRQAPGQGLEWMGALDPKTGDTAYSQKFKGRVTLTADESTSTAYMELSSLRSEDTAVYYCTRFYSYTYWGQGTLVTVSSTTTPAPRPPTPAPTIASQPLSLRPEACRPAAGGAVHTRGLDFACDIYIWAPLAGTCGVLLLSLVITLYCKRGRKKLLYIFKQPFMRPVQTTQEEDGCSCRFPEEEEGGCELRVKFSRSADAPAYKQGQNQLYNELNLGRREEYDVLDKRRGRDPEMGGKPRRKNPQEGLYNELQKDKMAEAYSEIGMKGERRRGKGHDGLYQGLSTATKDTYDALHMQALPPRGSGATNFSLLKQAGDVEENPGPMALPVTALLLPLALLLHAARPSLFNQEVQIPLTESYCGPCPKNWICYKNNCYQFFDESKNWYESQASCMSQNASLLKVYSKEDQDLLKLVKSYHWMGLVHIPTNGSWQWEDGSILSPNLLTIIEMQKGDCALYASSFKGYIENCSTPNTYICMQRTVSDPTRVETATETAWISLVTALHLVLGLSAVLGLLLLRWQFPAHYRRLRHALWPSLPDLHRVLGQYLRDTAALSPPKATVSDTCEEVEPSLLEILPKSSERTPLPLLELGPWSPEVPSTLEVYSCHPPRSPAKRLQLTELQEPAELVESDGVPKPSFWPTAQNSGGSAYSEERDRPYGLVSIDTVTVLDAEGPCTWPCSCEDDGYPALDLDAGLEPSECDFTSPGDEGPPRSYLRQWVVIPPPLSSPGPQASDVLPAGCTEWRVQTLAYLPQEDWAPTSLTRPAPPDSEGSRSSSSSSSSNNNNYCALGCYGGWHLSALPGNTQSS

SEQ ID NO: 128 - protein, 878 aa, Artificial Sequence
  BM NKG2D-IL-23R-2-IL-9R-2 amino acid sequence
MALPVTALLLPLALLLHAARPDVVMTQSPLSLPVTPGEPASISCRSSQSLVHSNANTYLHWYLQKPGQSPQLLIYKVSNRFSGVPDRFSGSGSGTDFTLKISRVEAEDVGVYYCSQNTHVPPTFGQGTKLEIKRGGGGSGGGGSGGGGSQVQLVQSGAEVKKPGASVKVSCKASGYTFTDYEMHWVRQAPGQGLEWMGALDPKTGDTAYSQKFKGRVTLTADESTSTAYMELSSLRSEDTAVYYCTRFYSYTYWGQGTLVTVSSTTTPAPRPPTPAPTIASQPLSLRPEACRPAAGGAVHTRGLDFACDIYIWAPLAGTCGVLLLSLVITLYCKRGRKKLLYIFKQPFMRPVQTTQEEDGCSCRFPEEEEGGCELRVKFSRSADAPAYKQGQNQLYNELNLGRREEYDVLDKRRGRDPEMGGKPRRKNPQEGLYNELQKDKMAEAYSEIGMKGERRRGKGHDGLYQGLSTATKDTYDALHMQALPPRGSGATNFSLLKQAGDVEENPGPMALPVTALLLPLALLLHAARPSLFNQEVQIPLTESYCGPCPKNWICYKNNCYQFFDESKNWYESQASCMSQNASLLKVYSKEDQDLLKLVKSYHWMGLVHIPTNGSWQWEDGSILSPNLLTIIEMQKGDCALYASSFKGYIENCSTPNTYICMQRTVSDPTRVETATETAWISLVTALHLVLGLSAVLGLLLLRWQFPAHYRRLRHALWPSLPDLHRVLGQYLRDTAALSPPKATVSDTCEEVEPSLLEILPKSSERTPLPLEFVSCLGIVNEELPSINTYFPQNILESHFNRISDVLPAGCTEWRVQTLAYLPQEDWAPTSLTRPAPPDSEGSRSSSSSSSSNNNNYCALGCYGGWHLSALPGNTQSS

SEQ ID NO: 129 - protein, 875 aa, Artificial Sequence
  BM NKG2D-GM-CSFRalpha-IL-9R-2 amino acid sequence
MALPVTALLLPLALLLHAARPDVVMTQSPLSLPVTPGEPASISCRSSQSLVHSNANTYLHWYLQKPGQSPQLLIYKVSNRFSGVPDRFSGSGSGTDFTLKISRVEAEDVGVYYCSQNTHVPPTFGQGTKLEIKRGGGGSGGGGSGGGGSQVQLVQSGAEVKKPGASVKVSCKASGYTFTDYEMHWVRQAPGQGLEWMGALDPKTGDTAYSQKFKGRVTLTADESTSTAYMELSSLRSEDTAVYYCTRFYSYTYWGQGTLVTVSSTTTPAPRPPTPAPTIASQPLSLRPEACRPAAGGAVHTRGLDFACDIYIWAPLAGTCGVLLLSLVITLYCKRGRKKLLYIFKQPFMRPVQTTQEEDGCSCRFPEEEEGGCELRVKFSRSADAPAYKQGQNQLYNELNLGRREEYDVLDKRRGRDPEMGGKPRRKNPQEGLYNELQKDKMAEAYSEIGMKGERRRGKGHDGLYQGLSTATKDTYDALHMQALPPRGSGATNFSLLKQAGDVEENPGPMALPVTALLLPLALLLHAARPSLFNQEVQIPLTESYCGPCPKNWICYKNNCYQFFDESKNWYESQASCMSQNASLLKVYSKEDQDLLKLVKSYHWMGLVHIPTNGSWQWEDGSILSPNLLTIIEMQKGDCALYASSFKGYIENCSTPNTYICMQRTVSDPTRVETATETAWISLVTALHLVLGLSAVLGLLLLRWQFPAHYRRLRHALWPSLPDLHRVLGQYLRDTAALSPPKATVSDTCEEVEPSLLEILPKSSERTPLPLEVEDEIIWEEFTPEEGKGYREEVLTVKEITDVLPAGCTEWRVQTLAYLPQEDWAPTSLTRPAPPDSEGSRSSSSSSSSNNNNYCALGCYGGWHLSALPGNTQSS

SEQ ID NO: 130 - protein, 964 aa, Artificial Sequence
  BM NKG2D-GM-CSFRbeta-1-IL-9R-2 amino acid sequence
MALPVTALLLPLALLLHAARPDVVMTQSPLSLPVTPGEPASISCRSSQSLVHSNANTYLHWYLQKPGQSPQLLIYKVSNRFSGVPDRFSGSGSGTDFTLKISRVEAEDVGVYYCSQNTHVPPTFGQGTKLEIKRGGGGSGGGGSGGGGSQVQLVQSGAEVKKPGASVKVSCKASGYTFTDYEMHWVRQAPGQGLEWMGALDPKTGDTAYSQKFKGRVTLTADESTSTAYMELSSLRSEDTAVYYCTRFYSYTYWGQGTLVTVSSTTTPAPRPPTPAPTIASQPLSLRPEACRPAAGGAVHTRGLDFACDIYIWAPLAGTCGVLLLSLVITLYCKRGRKKLLYIFKQPFMRPVQTTQEEDGCSCRFPEEEEGGCELRVKFSRSADAPAYKQGQNQLYNELNLGRREEYDVLDKRRGRDPEMGGKPRRKNPQEGLYNELQKDKMAEAYSEIGMKGERRRGKGHDGLYQGLSTATKDTYDALHMQALPPRGSGATNFSLLKQAGDVEENPGPMALPVTALLLPLALLLHAARPSLFNQEVQIPLTESYCGPCPKNWICYKNNCYQFFDESKNWYESQASCMSQNASLLKVYSKEDQDLLKLVKSYHWMGLVHIPTNGSWQWEDGSILSPNLLTIIEMQKGDCALYASSFKGYIENCSTPNTYICMQRTVSDPTRVETATETAWISLVTALHLVLGLSAVLGLLLLRWQFPAHYRRLRHALWPSLPDLHRVLGQYLRDTAALSPPKATVSDTCEEVEPSLLEILPKSSERTPLPLDTEDPGVASGYVSSADLVFTPNSGASSVSGPPGAPGPVKSGFEGYVELPPIEGRSPRSQPEGLLVLQQVGDYCFLPGLGPGPLSLRSKQVPVIQLFKALKQQDYLSLPPWEVNKPGEVCDVLPAGCTEWRVQTLAYLPQEDWAPTSLTRPAPPDSEGSRSSSSSSSSNNNNYCALGCYGGWHLSALPGNTQSS

SEQ ID NO: 131 - protein, 1028 aa, Artificial Sequence
  BM NKG2D-GM-CSFRbeta-2-IL-9R-2 amino acid sequence
MALPVTALLLPLALLLHAARPDVVMTQSPLSLPVTPGEPASISCRSSQSLVHSNANTYLHWYLQKPGQSPQLLIYKVSNRFSGVPDRFSGSGSGTDFTLKISRVEAEDVGVYYCSQNTHVPPTFGQGTKLEIKRGGGGSGGGGSGGGGSQVQLVQSGAEVKKPGASVKVSCKASGYTFTDYEMHWVRQAPGQGLEWMGALDPKTGDTAYSQKFKGRVTLTADESTSTAYMELSSLRSEDTAVYYCTRFYSYTYWGQGTLVTVSSTTTPAPRPPTPAPTIASQPLSLRPEACRPAAGGAVHTRGLDFACDIYIWAPLAGTCGVLLLSLVITLYCKRGRKKLLYIFKQPFMRPVQTTQEEDGCSCRFPEEEEGGCELRVKFSRSADAPAYKQGQNQLYNELNLGRREEYDVLDKRRGRDPEMGGKPRRKNPQEGLYNELQKDKMAEAYSEIGMKGERRRGKGHDGLYQGLSTATKDTYDALHMQALPPRGSGATNFSLLKQAGDVEENPGPMALPVTALLLPLALLLHAARPSLFNQEVQIPLTESYCGPCPKNWICYKNNCYQFFDESKNWYESQASCMSQNASLLKVYSKEDQDLLKLVKSYHWMGLVHIPTNGSWQWEDGSILSPNLLTIIEMQKGDCALYASSFKGYIENCSTPNTYICMQRTVSDPTRVETATETAWISLVTALHLVLGLSAVLGLLLLRWQFPAHYRRLRHALWPSLPDLHRVLGQYLRDTAALSPPKATVSDTCEEVEPSLLEILPKSSERTPLPLEKQASSFDFNGPYLGPPHSRSLPDILGQPEPPQEGGSQKSPPPGSLEYLCLPAGGQVQLVPLAQDTEDPGVASGYVSSADLVFTPNSGASSVSGPPGAPGPVKSGFEGYVELPPIEGRSPRSQPEGLLVLQQVGDYCFLPGLGPGPLSLRSKQVPVIQLFKALKQQDYLSLPPWEVNKPGEVCDVLPAGCTEWRVQTLAYLPQEDWAPTSLTRPAPPDSEGSRSSSSSSSSNNNNYCALGCYGGWHLSALPGNTQSS

SEQ ID NO: 132 - protein, 1015 aa, Artificial Sequence
  BM truncated NKG2D (89-216)-IL15Rbeta-1-IL-23R-2 amino acid sequence
MALPVTALLLPLALLLHAARPDVVMTQSPLSLPVTPGEPASISCRSSQSLVHSNANTYLHWYLQKPGQSPQLLIYKVSNRFSGVPDRFSGSGSGTDFTLKISRVEAEDVGVYYCSQNTHVPPTFGQGTKLEIKRGGGGSGGGGSGGGGSQVQLVQSGAEVKKPGASVKVSCKASGYTFTDYEMHWVRQAPGQGLEWMGALDPKTGDTAYSQKFKGRVTLTADESTSTAYMELSSLRSEDTAVYYCTRFYSYTYWGQGTLVTVSSTTTPAPRPPTPAPTIASQPLSLRPEACRPAAGGAVHTRGLDFACDIYIWAPLAGTCGVLLLSLVITLYCKRGRKKLLYIFKQPFMRPVQTTQEEDGCSCRFPEEEEGGCELRVKFSRSADAPAYKQGQNQLYNELNLGRREEYDVLDKRRGRDPEMGGKPRRKNPQEGLYNELQKDKMAEAYSEIGMKGERRRGKGHDGLYQGLSTATKDTYDALHMQALPPRGSGATNFSLLKQAGDVEENPGPMALPVTALLLPLALLLHAARPIPLTESYCGPCPKNWICYKNNCYQFFDESKNWYESQASCMSQNASLLKVYSKEDQDLLKLVKSYHWMGLVHIPTNGSWQWEDGSILSPNLLTIIEMQKGDCALYASSFKGYIENCSTPNTYICMQRTVSDPTRVETATETAWISLVTALHLVLGLSAVLGLLLLRWQFPAHYRRLRHALWPSLPDLHRVLGQYLRDTAALSPPKATVSDTCEEVEPSLLEILPKSSERTPLPLVTQLLLQQDKVPEPASLSSNHSLTSCFTNQGYFFFHLPDALEIEACQVYFTYDPYSEEDPDEGVAGAPTGSSPQPLQPLSGEDDAYCTFPSRDDLLLFSPSLLGGPSPPSTAPGGSGAGEERMPPSLQERVPRDWDPQPLGPPTPGVPDLVDFQPPPELVLREAGEEVPDAGPREGVSFPWSRPPGQGEFRALNARLPLNTDAYLSLQELQGQDPTHLVEFVSCLGIVNEELPSINTYFPQNILESHFNRIS

SEQ ID NO: 133 - protein, 1006 aa, Artificial Sequence
  BM truncated NKG2D (98-216)-IL15Rbeta-1-IL-23R-2 amino acid sequence
MALPVTALLLPLALLLHAARPDVVMTQSPLSLPVTPGEPASISCRSSQSLVHSNANTYLHWYLQKPGQSPQLLIYKVSNRFSGVPDRFSGSGSGTDFTLKISRVEAEDVGVYYCSQNTHVPPTFGQGTKLEIKRGGGGSGGGGSGGGGSQVQLVQSGAEVKKPGASVKVSCKASGYTFTDYEMHWVRQAPGQGLEWMGALDPKTGDTAYSQKFKGRVTLTADESTSTAYMELSSLRSEDTAVYYCTRFYSYTYWGQGTLVTVSSTTTPAPRPPTPAPTIASQPLSLRPEACRPAAGGAVHTRGLDFACDIYIWAPLAGTCGVLLLSLVITLYCKRGRKKLLYIFKQPFMRPVQTTQEEDGCSCRFPEEEEGGCELRVKFSRSADAPAYKQGQNQLYNELNLGRREEYDVLDKRRGRDPEMGGKPRRKNPQEGLYNELQKDKMAEAYSEIGMKGERRRGKGHDGLYQGLSTATKDTYDALHMQALPPRGSGATNFSLLKQAGDVEENPGPMALPVTALLLPLALLLHAARPPCPKNWICYKNNCYQFFDESKNWYESQASCMSQNASLLKVYSKEDQDLLKLVKSYHWMGLVHIPTNGSWQWEDGSILSPNLLTIIEMQKGDCALYASSFKGYIENCSTPNTYICMQRTVSDPTRVETATETAWISLVTALHLVLGLSAVLGLLLLRWQFPAHYRRLRHALWPSLPDLHRVLGQYLRDTAALSPPKATVSDTCEEVEPSLLEILPKSSERTPLPLVTQLLLQQDKVPEPASLSSNHSLTSCFTNQGYFFFHLPDALEIEACQVYFTYDPYSEEDPDEGVAGAPTGSSPQPLQPLSGEDDAYCTFPSRDDLLLFSPSLLGGPSPPSTAPGGSGAGEERMPPSLQERVPRDWDPQPLGPPTPGVPDLVDFQPPPELVLREAGEEVPDAGPREGVSFPWSRPPGQGEFRALNARLPLNTDAYLSLQELQGQDPTHLVEFVSCLGIVNEELPSINTYFPQNILESHFNRIS

SEQ ID NO: 134 - protein, 1070 aa, Artificial Sequence
  Anti-MIC-A/B scFv-IL7Ralpha-IL12Rbeta2 amino acid sequence
MALPVTALLLPLALLLHAARPDVVMTQSPLSLPVTPGEPASISCRSSQSLVHSNANTYLHWYLQKPGQSPQLLIYKVSNRFSGVPDRFSGSGSGTDFTLKISRVEAEDVGVYYCSQNTHVPPTFGQGTKLEIKRGGGGSGGGGSGGGGSQVQLVQSGAEVKKPGASVKVSCKASGYTFTDYEMHWVRQAPGQGLEWMGALDPKTGDTAYSQKFKGRVTLTADESTSTAYMELSSLRSEDTAVYYCTRFYSYTYWGQGTLVTVSSTTTPAPRPPTPAPTIASQPLSLRPEACRPAAGGAVHTRGLDFACDIYIWAPLAGTCGVLLLSLVITLYCKRGRKKLLYIFKQPFMRPVQTTQEEDGCSCRFPEEEEGGCELRVKFSRSADAPAYKQGQNQLYNELNLGRREEYDVLDKRRGRDPEMGGKPRRKNPQEGLYNELQKDKMAEAYSEIGMKGERRRGKGHDGLYQGLSTATKDTYDALHMQALPPRGSGATNFSLLKQAGDVEENPGPMALPVTALLLPLALLLHAARPQIQLVQSGPELKKPGETVKVSCKASGYMFTNYAMNWVKQAPEKGLKWMGWINTHTGDPTYADDFKGRIAFSLETSASTAYLQINNLKNEDTATYFCVRTYGNYAMDYWGQGTSVTVSSGGGGSGGGGSGGGGSDIQMTQTTSSLSASLGDRVTISCSASQDISNYLNWYQQKPDGTVKLLIYDTSILHLGVPSRFSGSGSGTDYSLTISNLEPEDIATYYCQQYSKFPRTFGGGTTLEIKSDPTRVETATETAWISLVTALHLVLGLSAVLGLLLLRWQFPAHYRRLRHALWPSLPDLHRVLGQYLRDTAALSPPKATVSDTCEEVEPSLLEILPKSSERTPLPLARDEVEGFLQDTFPQQLEESEKQRLGGDVQSPNCPSEDVVITPESFGRDSSLTCLAGNVSACDAPILSSSRSLDCRESGKNGPHVYQDLLLSLGTTNSTLPPPFSLQSGILTLNPVAQGQPILTSLGSNQEEAYVTMSSFYQNQSDPKPENPACPWTVLPAGDLPTHDGYLPSNIDDLPSHEAPLADSLEELEPQ

SEQ ID NO: 135 - protein, 486 aa, Artificial Sequence
  Construct 185 amino acid sequence
MALPVTALLLPLALLLHAARPDIVMTQTPLSLSVTPGQPASISCRSSQSLVHSNGNTYLHWYLQKPGQSPQLLIYKVSNRFSGVPDRFSGSGSGTDFTLKISRVEAEDVGVYYCSQNTHVPPTFGQGTKVEIKGGGGSGGGGSGGGGSQVQLVQSGAEVKKPGASVKVSCKASGYTFTDYEMHWVRQAPGQGLEWMGALDPKTGDTAYSQKFKGRVTLTADTSTSTVYMELSSLRSEDTAVYYCTRFYSYTYWGQGTLVTVSSTTTPAPRPPTPAPTIASQPLSLRPEACRPAAGGAVHTRGLDFACDIYIWAPLAGTCGVLLLSLVITLYCKRGRKKLLYIFKQPFMRPVQTTQEEDGCSCRFPEEEEGGCELRVKFSRSADAPAYKQGQNQLYNELNLGRREEYDVLDKRRGRDPEMGGKPRRKNPQEGLYNELQKDKMAEAYSEIGMKGERRRGKGHDGLYQGLSTATKDTYDALHMQALPPR

SEQ ID NO: 136 - protein, 1100 aa, Artificial Sequence
  Construct 185-NKG2D-IL15Rbeta-1-IL-21R-1 amino acid sequence
MALPVTALLLPLALLLHAARPDIVMTQTPLSLSVTPGQPASISCRSSQSLVHSNGNTYLHWYLQKPGQSPQLLIYKVSNRFSGVPDRFSGSGSGTDFTLKISRVEAEDVGVYYCSQNTHVPPTFGQGTKVEIKGGGGSGGGGSGGGGSQVQLVQSGAEVKKPGASVKVSCKASGYTFTDYEMHWVRQAPGQGLEWMGALDPKTGDTAYSQKFKGRVTLTADTSTSTVYMELSSLRSEDTAVYYCTRFYSYTYWGQGTLVTVSSTTTPAPRPPTPAPTIASQPLSLRPEACRPAAGGAVHTRGLDFACDIYIWAPLAGTCGVLLLSLVITLYCKRGRKKLLYIFKQPFMRPVQTTQEEDGCSCRFPEEEEGGCELRVKFSRSADAPAYKQGQNQLYNELNLGRREEYDVLDKRRGRDPEMGGKPRRKNPQEGLYNELQKDKMAEAYSEIGMKGERRRGKGHDGLYQGLSTATKDTYDALHMQALPPRGSGATNFSLLKQAGDVEENPGPMALPVTALLLPLALLLHAARPSLFNQEVQIPLTESYCGPCPKNWICYKNNCYQFFDESKNWYESQASCMSQNASLLKVYSKEDQDLLKLVKSYHWMGLVHIPTNGSWQWEDGSILSPNLLTIIEMQKGDCALYASSFKGYIENCSTPNTYICMQRTVSDPTRVETATETAWISLVTALHLVLGLSAVLGLLLLRWQFPAHYRRLRHALWPSLPDLHRVLGQYLRDTAALSPPKATVSDTCEEVEPSLLEILPKSSERTPLPLVTQLLLQQDKVPEPASLSSNHSLTSCFTNQGYFFFHLPDALEIEACQVYFTYDPYSEEDPDEGVAGAPTGSSPQPLQPLSGEDDAYCTFPSRDDLLLFSPSLLGGPSPPSTAPGGSGAGEERMPPSLQERVPRDWDPQPLGPPTPGVPDLVDFQPPPELVLREAGEEVPDAGPREGVSFPWSRPPGQGEFRALNARLPLNTDAYLSLQELQGQDPTHLVLELGPWSPEVPSTLEVYSCHPPRSPAKRLQLTELQEPAELVESDGVPKPSFWPTAQNSGGSAYSEERDRPYGLVSIDTVTVLDAEGPCTWPCSCEDDGYPALDLDAGLEPS

SEQ ID NO: 137 - protein, 923 aa, Artificial Sequence
  Construct 185-NKG2D-IL15Rbeta-2-IL-21R-2 amino acid sequence
MALPVTALLLPLALLLHAARPDIVMTQTPLSLSVTPGQPASISCRSSQSLVHSNGNTYLHWYLQKPGQSPQLLIYKVSNRFSGVPDRFSGSGSGTDFTLKISRVEAEDVGVYYCSQNTHVPPTFGQGTKVEIKGGGGSGGGGSGGGGSQVQLVQSGAEVKKPGASVKVSCKASGYTFTDYEMHWVRQAPGQGLEWMGALDPKTGDTAYSQKFKGRVTLTADTSTSTVYMELSSLRSEDTAVYYCTRFYSYTYWGQGTLVTVSSTTTPAPRPPTPAPTIASQPLSLRPEACRPAAGGAVHTRGLDFACDIYIWAPLAGTCGVLLLSLVITLYCKRGRKKLLYIFKQPFMRPVQTTQEEDGCSCRFPEEEEGGCELRVKFSRSADAPAYKQGQNQLYNELNLGRREEYDVLDKRRGRDPEMGGKPRRKNPQEGLYNELQKDKMAEAYSEIGMKGERRRGKGHDGLYQGLSTATKDTYDALHMQALPPRGSGATNFSLLKQAGDVEENPGPMALPVTALLLPLALLLHAARPSLFNQEVQIPLTESYCGPCPKNWICYKNNCYQFFDESKNWYESQASCMSQNASLLKVYSKEDQDLLKLVKSYHWMGLVHIPTNGSWQWEDGSILSPNLLTIIEMQKGDCALYASSFKGYIENCSTPNTYICMQRTVSDPTRVETATETAWISLVTALHLVLGLSAVLGLLLLRWQFPAHYRRLRHALWPSLPDLHRVLGQYLRDTAALSPPKATVSDTCEEVEPSLLEILPKSSERTPLPLEPASLSSNHSLTSCFTNQGYFFFHLPDALEIEACQVYFTYDPYSEEDPDEGVAGAPTGSSPQPLQPLSGEDDAYCTFPSRDDLLLFSEFRALNARLPLNTDAYLSLQELQGQDPTHLVECDFTSPGDEGPPRSYLRQWVVIPPPLSSPGPQAS

SEQ ID NO: 138 - protein, 921 aa, Artificial Sequence
  Construct 185-NKG2D-IL15Rbeta-2-IL-23R-2 amino acid sequence
MALPVTALLLPLALLLHAARPDIVMTQTPLSLSVTPGQPASISCRSSQSLVHSNGNTYLHWYLQKPGQSPQLLIYKVSNRFSGVPDRFSGSGSGTDFTLKISRVEAEDVGVYYCSQNTHVPPTFGQGTKVEIKGGGGSGGGGSGGGGSQVQLVQSGAEVKKPGASVKVSCKASGYTFTDYEMHWVRQAPGQGLEWMGALDPKTGDTAYSQKFKGRVTLTADTSTSTVYMELSSLRSEDTAVYYCTRFYSYTYWGQGTLVTVSSTTTPAPRPPTPAPTIASQPLSLRPEACRPAAGGAVHTRGLDFACDIYIWAPLAGTCGVLLLSLVITLYCKRGRKKLLYIFKQPFMRPVQTTQEEDGCSCRFPEEEEGGCELRVKFSRSADAPAYKQGQNQLYNELNLGRREEYDVLDKRRGRDPEMGGKPRRKNPQEGLYNELQKDKMAEAYSEIGMKGERRRGKGHDGLYQGLSTATKDTYDALHMQALPPRGSGATNFSLLKQAGDVEENPGPMALPVTALLLPLALLLHAARPSLFNQEVQIPLTESYCGPCPKNWICYKNNCYQFFDESKNWYESQASCMSQNASLLKVYSKEDQDLLKLVKSYHWMGLVHIPTNGSWQWEDGSILSPNLLTIIEMQKGDCALYASSFKGYIENCSTPNTYICMQRTVSDPTRVETATETAWISLVTALHLVLGLSAVLGLLLLRWQFPAHYRRLRHALWPSLPDLHRVLGQYLRDTAALSPPKATVSDTCEEVEPSLLEILPKSSERTPLPLEPASLSSNHSLTSCFTNQGYFFFHLPDALEIEACQVYFTYDPYSEEDPDEGVAGAPTGSSPQPLQPLSGEDDAYCTFPSRDDLLLFSEFRALNARLPLNTDAYLSLQELQGQDPTHLVEFVSCLGIVNEELPSINTYFPQNILESHFNRIS

SEQ ID NO: 139 - protein, 918 aa, Artificial Sequence
  Construct 185-NKG2D-IL15Rbeta-2-GM-CSFRalpha amino acid sequence
MALPVTALLLPLALLLHAARPDIVMTQTPLSLSVTPGQPASISCRSSQSLVHSNGNTYLHWYLQKPGQSPQLLIYKVSNRFSGVPDRFSGSGSGTDFTLKISRVEAEDVGVYYCSQNTHVPPTFGQGTKVEIKGGGGSGGGGSGGGGSQVQLVQSGAEVKKPGASVKVSCKASGYTFTDYEMHWVRQAPGQGLEWMGALDPKTGDTAYSQKFKGRVTLTADTSTSTVYMELSSLRSEDTAVYYCTRFYSYTYWGQGTLVTVSSTTTPAPRPPTPAPTIASQPLSLRPEACRPAAGGAVHTRGLDFACDIYIWAPLAGTCGVLLLSLVITLYCKRGRKKLLYIFKQPFMRPVQTTQEEDGCSCRFPEEEEGGCELRVKFSRSADAPAYKQGQNQLYNELNLGRREEYDVLDKRRGRDPEMGGKPRRKNPQEGLYNELQKDKMAEAYSEIGMKGERRRGKGHDGLYQGLSTATKDTYDALHMQALPPRGSGATNFSLLKQAGDVEENPGPMALPVTALLLPLALLLHAARPSLFNQEVQIPLTESYCGPCPKNWICYKNNCYQFFDESKNWYESQASCMSQNASLLKVYSKEDQDLLKLVKSYHWMGLVHIPTNGSWQWEDGSILSPNLLTIIEMQKGDCALYASSFKGYIENCSTPNTYICMQRTVSDPTRVETATETAWISLVTALHLVLGLSAVLGLLLLRWQFPAHYRRLRHALWPSLPDLHRVLGQYLRDTAALSPPKATVSDTCEEVEPSLLEILPKSSERTPLPLEPASLSSNHSLTSCFTNQGYFFFHLPDALEIEACQVYFTYDPYSEEDPDEGVAGAPTGSSPQPLQPLSGEDDAYCTFPSRDDLLLFSEFRALNARLPLNTDAYLSLQELQGQDPTHLVEVEDEIIWEEFTPEEGKGYREEVLTVKEIT

SEQ ID NO: 140 - protein, 1063 aa, Artificial Sequence
  Construct 185-NKG2D-IL15Rbeta-1-IL-9R-2 amino acid sequence
MALPVTALLLPLALLLHAARPDIVMTQTPLSLSVTPGQPASISCRSSQSLVHSNGNTYLHWYLQKPGQSPQLLIYKVSNRFSGVPDRFSGSGSGTDFTLKISRVEAEDVGVYYCSQNTHVPPTFGQGTKVEIKGGGGSGGGGSGGGGSQVQLVQSGAEVKKPGASVKVSCKASGYTFTDYEMHWVRQAPGQGLEWMGALDPKTGDTAYSQKFKGRVTLTADTSTSTVYMELSSLRSEDTAVYYCTRFYSYTYWGQGTLVTVSSTTTPAPRPPTPAPTIASQPLSLRPEACRPAAGGAVHTRGLDFACDIYIWAPLAGTCGVLLLSLVITLYCKRGRKKLLYIFKQPFMRPVQTTQEEDGCSCRFPEEEEGGCELRVKFSRSADAPAYKQGQNQLYNELNLGRREEYDVLDKRRGRDPEMGGKPRRKNPQEGLYNELQKDKMAEAYSEIGMKGERRRGKGHDGLYQGLSTATKDTYDALHMQALPPRGSGATNFSLLKQAGDVEENPGPMALPVTALLLPLALLLHAARPSLFNQEVQIPLTESYCGPCPKNWICYKNNCYQFFDESKNWYESQASCMSQNASLLKVYSKEDQDLLKLVKSYHWMGLVHIPTNGSWQWEDGSILSPNLLTIIEMQKGDCALYASSFKGYIENCSTPNTYICMQRTVSDPTRVETATETAWISLVTALHLVLGLSAVLGLLLLRWQFPAHYRRLRHALWPSLPDLHRVLGQYLRDTAALSPPKATVSDTCEEVEPSLLEILPKSSERTPLPLVTQLLLQQDKVPEPASLSSNHSLTSCFTNQGYFFFHLPDALEIEACQVYFTYDPYSEEDPDEGVAGAPTGSSPQPLQPLSGEDDAYCTFPSRDDLLLFSPSLLGGPSPPSTAPGGSGAGEERMPPSLQERVPRDWDPQPLGPPTPGVPDLVDFQPPPELVLREAGEEVPDAGPREGVSFPWSRPPGQGEFRALNARLPLNTDAYLSLQELQGQDPTHLVDVLPAGCTEWRVQTLAYLPQEDWAPTSLTRPAPPDSEGSRSSSSSSSSNNNNYCALGCYGGWHLSALPGNTQSS

SEQ ID NO: 141 - protein, 486 aa, Artificial Sequence
  CTL-019 amino acid sequence
MALPVTALLLPLALLLHAARPDIQMTQTTSSLSASLGDRVTISCRASQDISKYLNWYQQKPDGTVKLLIYHTSRLHSGVPSRFSGSGSGTDYSLTISNLEQEDIATYFCQQGNTLPYTFGGGTKLEITGGGGSGGGGSGGGGSEVKLQESGPGLVAPSQSLSVTCTVSGVSLPDYGVSWIRQPPRKGLEWLGVIWGSETTYYNSALKSRLTIIKDNSKSQVFLKMNSLQTDDTAIYYCAKHYYYGGSYAMDYWGQGTSVTVSSTTTPAPRPPTPAPTIASQPLSLRPEACRPAAGGAVHTRGLDFACDIYIWAPLAGTCGVLLLSLVITLYCKRGRKKLLYIFKQPFMRPVQTTQEEDGCSCRFPEEEEGGCELRVKFSRSADAPAYKQGQNQLYNELNLGRREEYDVLDKRRGRDPEMGGKPRRKNPQEGLYNELQKDKMAEAYSEIGMKGERRRGKGHDGLYQGLSTATKDTYDALHMQALPPR

SEQ ID NO: 142 - protein, 965 aa, Artificial Sequence
  CTL-019-NKG2D-IL-7Ralpha-IL-12Rbeta2 amino acid sequence
MALPVTALLLPLALLLHAARPDIQMTQTTSSLSASLGDRVTISCRASQDISKYLNWYQQKPDGTVKLLIYHTSRLHSGVPSRFSGSGSGTDYSLTISNLEQEDIATYFCQQGNTLPYTFGGGTKLEITGGGGSGGGGSGGGGSEVKLQESGPGLVAPSQSLSVTCTVSGVSLPDYGVSWIRQPPRKGLEWLGVIWGSETTYYNSALKSRLTIIKDNSKSQVFLKMNSLQTDDTAIYYCAKHYYYGGSYAMDYWGQGTSVTVSSTTTPAPRPPTPAPTIASQPLSLRPEACRPAAGGAVHTRGLDFACDIYIWAPLAGTCGVLLLSLVITLYCKRGRKKLLYIFKQPFMRPVQTTQEEDGCSCRFPEEEEGGCELRVKFSRSADAPAYKQGQNQLYNELNLGRREEYDVLDKRRGRDPEMGGKPRRKNPQEGLYNELQKDKMAEAYSEIGMKGERRRGKGHDGLYQGLSTATKDTYDALHMQALPPRGSGATNFSLLKQAGDVEENPGPMALPVTALLLPLALLLHAARPSLFNQEVQIPLTESYCGPCPKNWICYKNNCYQFFDESKNWYESQASCMSQNASLLKVYSKEDQDLLKLVKSYHWMGLVHIPTNGSWQWEDGSILSPNLLTIIEMQKGDCALYASSFKGYIENCSTPNTYICMQRTVSDPTRVETATETAWISLVTALHLVLGLSAVLGLLLLRWQFPAHYRRLRHALWPSLPDLHRVLGQYLRDTAALSPPKATVSDTCEEVEPSLLEILPKSSERTPLPLARDEVEGFLQDTFPQQLEESEKQRLGGDVQSPNCPSEDVVITPESFGRDSSLTCLAGNVSACDAPILSSSRSLDCRESGKNGPHVYQDLLLSLGTTNSTLPPPFSLQSGILTLNPVAQGQPILTSLGSNQEEAYVTMSSFYQNQSDPKPENPACPWTVLPAGDLPTHDGYLPSNIDDLPSHEAPLADSLEELEPQ

SEQ ID NO: 143 - protein, 368 aa, Artificial Sequence
  AS67190 amino acid sequence
MALPVTALLLPLALLLHAARPQVQLVESGGGLVQAGGSLRLSCAASGNVFRFNIMGWYRQAPGNQRELVASIDDGGDRSYADSVEGRFTISRENGKKIMYLQMNSLKPEDTAVYYCAAGLGTYLNGRVSMATNYWGQGTQVTVSSTTTPAPRPPTPAPTIASQPLSLRPEACRPAAGGAVHTRGLDFACDIYIWAPLAGTCGVLLLSLVITLYCKRGRKKLLYIFKQPFMRPVQTTQEEDGCSCRFPEEEEGGCELRVKFSRSADAPAYKQGQNQLYNELNLGRREEYDVLDKRRGRDPEMGGKPRRKNPQEGLYNELQKDKMAEAYSEIGMKGERRRGKGHDGLYQGLSTATKDTYDALHMQALPPR

SEQ ID NO: 144 - protein, 847 aa, Artificial Sequence
  AS67190 NKG2D-IL-7Ralpha-IL-12Rbeta2 amino acid sequence
MALPVTALLLPLALLLHAARPQVQLVESGGGLVQAGGSLRLSCAASGNVFRFNIMGWYRQAPGNQRELVASIDDGGDRSYADSVEGRFTISRENGKKIMYLQMNSLKPEDTAVYYCAAGLGTYLNGRVSMATNYWGQGTQVTVSSTTTPAPRPPTPAPTIASQPLSLRPEACRPAAGGAVHTRGLDFACDIYIWAPLAGTCGVLLLSLVITLYCKRGRKKLLYIFKQPFMRPVQTTQEEDGCSCRFPEEEEGGCELRVKFSRSADAPAYKQGQNQLYNELNLGRREEYDVLDKRRGRDPEMGGKPRRKNPQEGLYNELQKDKMAEAYSEIGMKGERRRGKGHDGLYQGLSTATKDTYDALHMQALPPRGSGATNFSLLKQAGDVEENPGPMALPVTALLLPLALLLHAARPSLFNQEVQIPLTESYCGPCPKNWICYKNNCYQFFDESKNWYESQASCMSQNASLLKVYSKEDQDLLKLVKSYHWMGLVHIPTNGSWQWEDGSILSPNLLTIIEMQKGDCALYASSFKGYIENCSTPNTYICMQRTVSDPTRVETATETAWISLVTALHLVLGLSAVLGLLLLRWQFPAHYRRLRHALWPSLPDLHRVLGQYLRDTAALSPPKATVSDTCEEVEPSLLEILPKSSERTPLPLARDEVEGFLQDTFPQQLEESEKQRLGGDVQSPNCPSEDVVITPESFGRDSSLTCLAGNVSACDAPILSSSRSLDCRESGKNGPHVYQDLLLSLGTTNSTLPPPFSLQSGILTLNPVAQGQPILTSLGSNQEEAYVTMSSFYQNQSDPKPENPACPWTVLPAGDLPTHDGYLPSNIDDLPSHEAPLADSLEELEPQ

SEQ ID NO: 145 - protein, 141 aa, Artificial Sequence
  TIGIT extracellular domain amino acid sequence
MRWCLLLIWAQGLRQAPLASGMMTGTIETTGNISAEKGGSIILQCHLSSTTAQVTQVNWEQQDQLLAICNADLGWHISPSFKDRVAPGPGLGLTLQSLTVNDTGEYFCIYHTYPDGTYTGRIFLEVLESSVAEHGARFQIP

SEQ ID NO: 146 - protein, 950 aa, Artificial Sequence
  BM TIGIT-IL-7Ralpha-IL-12Rbeta2 amino acid sequence
MALPVTALLLPLALLLHAARPDVVMTQSPLSLPVTPGEPASISCRSSQSLVHSNANTYLHWYLQKPGQSPQLLIYKVSNRFSGVPDRFSGSGSGTDFTLKISRVEAEDVGVYYCSQNTHVPPTFGQGTKLEIKRGGGGSGGGGSGGGGSQVQLVQSGAEVKKPGASVKVSCKASGYTFTDYEMHWVRQAPGQGLEWMGALDPKTGDTAYSQKFKGRVTLTADESTSTAYMELSSLRSEDTAVYYCTRFYSYTYWGQGTLVTVSSTTTPAPRPPTPAPTIASQPLSLRPEACRPAAGGAVHTRGLDFACDIYIWAPLAGTCGVLLLSLVITLYCKRGRKKLLYIFKQPFMRPVQTTQEEDGCSCRFPEEEEGGCELRVKFSRSADAPAYKQGQNQLYNELNLGRREEYDVLDKRRGRDPEMGGKPRRKNPQEGLYNELQKDKMAEAYSEIGMKGERRRGKGHDGLYQGLSTATKDTYDALHMQALPPRGSGATNFSLLKQAGDVEENPGPMRWCLLLIWAQGLRQAPLASGMMTGTIETTGNISAEKGGSIILQCHLSSTTAQVTQVNWEQQDQLLAICNADLGWHISPSFKDRVAPGPGLGLTLQSLTVNDTGEYFCIYHTYPDGTYTGRIFLEVLESSVAEHGARFQIPSDPTRVETATETAWISLVTALHLVLGLSAVLGLLLLRWQFPAHYRRLRHALWPSLPDLHRVLGQYLRDTAALSPPKATVSDTCEEVEPSLLEILPKSSERTPLPLARDEVEGFLQDTFPQQLEESEKQRLGGDVQSPNCPSEDVVITPESFGRDSSLTCLAGNVSACDAPILSSSRSLDCRESGKNGPHVYQDLLLSLGTTNSTLPPPFSLQSGILTLNPVAQGQPILTSLGSNQEEAYVTMSSFYQNQSDPKPENPACPWTVLPAGDLPTHDGYLPSNIDDLPSHEAPLADSLEELEPQ

SEQ ID NO: 147 - protein, 373 aa, Artificial Sequence
  SIRP-alpha extracellular domain amino acid sequence
MEPAGPAPGRLGPLLCLLLAASCAWSGVAGEEELQVIQPDKSVLVAAGETATLRCTATSLIPVGPIQWFRGAGPGRELIYNQKEGHFPRVTTVSDLTKRNNMDFSIRIGNITPADAGTYYCVKFRKGSPDDVEFKSGAGTELSVRAKPSAPVVSGPAARATPQHTVSFTCESHGFSPRDITLKWFKNGNELSDFQTNVDPVGESVSYSIHSTAKVVLTREDVHSQVICEVAHVTLQGDPLRGTANLSETIRVPPTLEVTQQPVRAENQVNVTCQVRKFYPQRLQLTWLENGNVSRTETASTVTENKDGTYNWMSWLLVNVSAHRDDVKLTCQVEHDGQPAVSKSHDLKVSAHPKEQGSNTAAENTGSNERNIY

SEQ ID NO: 148 - protein, 1063 aa, Artificial Sequence
  AS67190 SIRP-alpha-IL-7Ralpha-IL-12Rbeta2 amino acid sequence
MALPVTALLLPLALLLHAARPQVQLVESGGGLVQAGGSLRLSCAASGNVFRFNIMGWYRQAPGNQRELVASIDDGGDRSYADSVEGRFTISRENGKKIMYLQMNSLKPEDTAVYYCAAGLGTYLNGRVSMATNYWGQGTQVTVSSTTTPAPRPPTPAPTIASQPLSLRPEACRPAAGGAVHTRGLDFACDIYIWAPLAGTCGVLLLSLVITLYCKRGRKKLLYIFKQPFMRPVQTTQEEDGCSCRFPEEEEGGCELRVKFSRSADAPAYKQGQNQLYNELNLGRREEYDVLDKRRGRDPEMGGKPRRKNPQEGLYNELQKDKMAEAYSEIGMKGERRRGKGHDGLYQGLSTATKDTYDALHMQALPPRGSGATNFSLLKQAGDVEENPGPMEPAGPAPGRLGPLLCLLLAASCAWSGVAGEEELQVIQPDKSVLVAAGETATLRCTATSLIPVGPIQWFRGAGPGRELIYNQKEGHFPRVTTVSDLTKRNNMDFSIRIGNITPADAGTYYCVKFRKGSPDDVEFKSGAGTELSVRAKPSAPVVSGPAARATPQHTVSFTCESHGFSPRDITLKWFKNGNELSDFQTNVDPVGESVSYSIHSTAKVVLTREDVHSQVICEVAHVTLQGDPLRGTANLSETIRVPPTLEVTQQPVRAENQVNVTCQVRKFYPQRLQLTWLENGNVSRTETASTVTENKDGTYNWMSWLLVNVSAHRDDVKLTCQVEHDGQPAVSKSHDLKVSAHPKEQGSNTAAENTGSNERNIYSDPTRVETATETAWISLVTALHLVLGLSAVLGLLLLRWQFPAHYRRLRHALWPSLPDLHRVLGQYLRDTAALSPPKATVSDTCEEVEPSLLEILPKSSERTPLPLARDEVEGFLQDTFPQQLEESEKQRLGGDVQSPNCPSEDVVITPESFGRDSSLTCLAGNVSACDAPILSSSRSLDCRESGKNGPHVYQDLLLSLGTTNSTLPPPFSLQSGILTLNPVAQGQPILTSLGSNQEEAYVTMSSFYQNQSDPKPENPACPWTVLPAGDLPTHDGYLPSNIDDLPSHEAPLADSLEELEPQ

SEQ ID NO: 149 - protein, 380 aa, Artificial Sequence
  NKG2D CAR amino acid sequence
MALPVTALLLPLALLLHAARPSLFNQEVQIPLTESYCGPCPKNWICYKNNCYQFFDESKNWYESQASCMSQNASLLKVYSKEDQDLLKLVKSYHWMGLVHIPTNGSWQWEDGSILSPNLLTIIEMQKGDCALYASSFKGYIENCSTPNTYICMQRTVTTTPAPRPPTPAPTIASQPLSLRPEACRPAAGGAVHTRGLDFACDIYIWAPLAGTCGVLLLSLVITLYCKRGRKKLLYIFKQPFMRPVQTTQEEDGCSCRFPEEEEGGCELRVKFSRSADAPAYKQGQNQLYNELNLGRREEYDVLDKRRGRDPEMGGKPRRKNPQEGLYNELQKDKMAEAYSEIGMKGERRRGKGHDGLYQGLSTATKDTYDALHMQALPPR

SEQ ID NO: 150 - protein, 965 aa, Artificial Sequence
  BM NKG2D (Deleted) IL15Rbeta-1-IL-21R-1 amino acid sequence
MALPVTALLLPLALLLHAARPDVVMTQSPLSLPVTPGEPASISCRSSQSLVHSNANTYLHWYLQKPGQSPQLLIYKVSNRFSGVPDRFSGSGSGTDFTLKISRVEAEDVGVYYCSQNTHVPPTFGQGTKLEIKRGGGGSGGGGSGGGGSQVQLVQSGAEVKKPGASVKVSCKASGYTFTDYEMHWVRQAPGQGLEWMGALDPKTGDTAYSQKFKGRVTLTADESTSTAYMELSSLRSEDTAVYYCTRFYSYTYWGQGTLVTVSSTTTPAPRPPTPAPTIASQPLSLRPEACRPAAGGAVHTRGLDFACDIYIWAPLAGTCGVLLLSLVITLYCKRGRKKLLYIFKQPFMRPVQTTQEEDGCSCRFPEEEEGGCELRVKFSRSADAPAYKQGQNQLYNELNLGRREEYDVLDKRRGRDPEMGGKPRRKNPQEGLYNELQKDKMAEAYSEIGMKGERRRGKGHDGLYQGLSTATKDTYDALHMQALPPRGSGATNFSLLKQAGDVEENPGPMALPVTALLLPLALLLHAARPSDPTRVETATETAWISLVTALHLVLGLSAVLGLLLLRWQFPAHYRRLRHALWPSLPDLHRVLGQYLRDTAALSPPKATVSDTCEEVEPSLLEILPKSSERTPLPLVTQLLLQQDKVPEPASLSSNHSLTSCFTNQGYFFFHLPDALEIEACQVYFTYDPYSEEDPDEGVAGAPTGSSPQPLQPLSGEDDAYCTFPSRDDLLLFSPSLLGGPSPPSTAPGGSGAGEERMPPSLQERVPRDWDPQPLGPPTPGVPDLVDFQPPPELVLREAGEEVPDAGPREGVSFPWSRPPGQGEFRALNARLPLNTDAYLSLQELQGQDPTHLVLELGPWSPEVPSTLEVYSCHPPRSPAKRLQLTELQEPAELVESDGVPKPSFWPTAQNSGGSAYSEERDRPYGLVSIDTVTVLDAEGPCTWPCSCEDDGYPALDLDAGLEPS

SEQ ID NO: 151 - protein, 965 aa, Artificial Sequence
  BM TPOR (S505N, W515K) IL15Rbeta-1-IL-21R-1 amino acid sequence
MALPVTALLLPLALLLHAARPDVVMTQSPLSLPVTPGEPASISCRSSQSLVHSNANTYLHWYLQKPGQSPQLLIYKVSNRFSGVPDRFSGSGSGTDFTLKISRVEAEDVGVYYCSQNTHVPPTFGQGTKLEIKRGGGGSGGGGSGGGGSQVQLVQSGAEVKKPGASVKVSCKASGYTFTDYEMHWVRQAPGQGLEWMGALDPKTGDTAYSQKFKGRVTLTADESTSTAYMELSSLRSEDTAVYYCTRFYSYTYWGQGTLVTVSSTTTPAPRPPTPAPTIASQPLSLRPEACRPAAGGAVHTRGLDFACDIYIWAPLAGTCGVLLLSLVITLYCKRGRKKLLYIFKQPFMRPVQTTQEEDGCSCRFPEEEEGGCELRVKFSRSADAPAYKQGQNQLYNELNLGRREEYDVLDKRRGRDPEMGGKPRRKNPQEGLYNELQKDKMAEAYSEIGMKGERRRGKGHDGLYQGLSTATKDTYDALHMQALPPRGSGATNFSLLKQAGDVEENPGPMALPVTALLLPLALLLHAARPSDPTRVETATETAWISLVTALHLVLGLNAVLGLLLLRKQFPAHYRRLRHALWPSLPDLHRVLGQYLRDTAALSPPKATVSDTCEEVEPSLLEILPKSSERTPLPLVTQLLLQQDKVPEPASLSSNHSLTSCFTNQGYFFFHLPDALEIEACQVYFTYDPYSEEDPDEGVAGAPTGSSPQPLQPLSGEDDAYCTFPSRDDLLLFSPSLLGGPSPPSTAPGGSGAGEERMPPSLQERVPRDWDPQPLGPPTPGVPDLVDFQPPPELVLREAGEEVPDAGPREGVSFPWSRPPGQGEFRALNARLPLNTDAYLSLQELQGQDPTHLVLELGPWSPEVPSTLEVYSCHPPRSPAKRLQLTELQEPAELVESDGVPKPSFWPTAQNSGGSAYSEERDRPYGLVSIDTVTVLDAEGPCTWPCSCEDDGYPALDLDAGLEPS

SEQ ID NO: 152 - protein, 2 aa, Artificial Sequence
  Exemplary linker
  MISC_FEATURE (1)..(2): GS can be repeated n times, where n is an integer of at least one
GS

SEQ ID NO: 153 - protein, 5 aa, Artificial Sequence
  Exemplary linker
  MISC_FEATURE (1)..(5): GSGGS can be repeated n times, where n is an integer of at least one
GSGGS

SEQ ID NO: 154 - protein, 4 aa, Artificial Sequence
  Exemplary linker
  MISC_FEATURE (1)..(4): GGGS can be repeated n times, where n is an integer of at least one
GGGS

SEQ ID NO: 155 - protein, 5 aa, Artificial Sequence
  Exemplary linker
  MISC_FEATURE (1)..(5): GGGGS can be repeated n times, where n is an integer of at least one
GGGGS

SEQ ID NO: 156 - protein, 119 aa, Artificial Sequence
  truncated NKG2D (98-216)
PCPKNWICYKNNCYQFFDESKNWYESQASCMSQNASLLKVYSKEDQDLLKLVKSYHWMGLVHIPTNGSWQWEDGSILSPNLLTIIEMQKGDCALYASSFKGYIENCSTPNTYICMQRTV

SEQ ID NO: 157 - protein, 128 aa, Artificial Sequence
  truncated NKG2D (89-216)
IPLTESYCGPCPKNWICYKNNCYQFFDESKNWYESQASCMSQNASLLKVYSKEDQDLLKLVKSYHWMGLVHIPTNGSWQWEDGSILSPNLLTIIEMQKGDCALYASSFKGYIENCSTPNTYICMQRTV

SEQ ID NO: 158 - protein, 11 aa, Artificial Sequence
  C-MYC tag
DEQKLISEEDL

SEQ ID NO: 159 - protein, 21 aa, Artificial Sequence
  C-MYC-C-MYC tag
DEQKLISEEDLEQKLISEEDL

SEQ ID NO: 160 - protein, 40 aa, Artificial Sequence
  SBP tag
DYMDEKTTGWRGGHVVEGLAGELEQLRARLEHHPQGQREP

What is claimed:

1. An immune effector cell expressing
(i) a chimeric cytokine receptor comprising:
(a) a first extracellular antigen binding domain, wherein the first extracellular antigen binding domain is derived from NKG2D, truncated NKG2D, antibody or antigen binding fragment thereof targeting NKG2D ligands, TIGIT or SIRP-α, or a variant thereof,
(b) a first transmembrane domain, and
(c) a cytokine receptor intracellular domain; and
(ii) optionally a functional exogenous receptor comprising:
(a) a second extracellular antigen binding domain,
(b) a second transmembrane domain, and
(c) an intracellular signaling domain.

2. The immune effector cell of claim 1, wherein the first extracellular antigen binding domain binds to an antigen expressed on the surface of a tumor cell.

3. The immune effector cell of claim 1 or claim 2,
(i) wherein the first extracellular antigen binding domain is derived from NKG2D or truncated NKG2D, or a variant thereof, wherein optionally the first extracellular antigen binding domain is derived from the extracellular domain (ECD) of NKG2D or truncated NKG2D, and wherein optionally the first extracellular antigen binding domain comprises the amino acid sequence of SEQ ID NOs: 6, 156 or 157, or an amino acid sequence having at least 75%, 80%, 85%, 90%, 91%, 92%, 93%, 94%, 95%, 96%, 97%, 98%, or 99% identity to SEQ ID NOs: 6, 156 or 157;
(ii) wherein the first extracelluar antigen domain comprises an antibody or antigen binding fragment thereof that binds to an NKG2D ligand or a variant thereof, wherein optionally the NKG2D ligand is selected from a group consisting of MICA/B, ULBP-1, ULBP-2,5,6 and ULBP-3, and wherein optionally the antibody or antigen binding fragment thereof comprises one or more scFv(s) or one or more sdAb(s) that bind to the NKG2D ligand;
(iii) wherein the first extracelluar antigen domain is derived from TIGIT or a variant thereof, wherein optionally the first extracelluar antigen domain is derived from the ECD of TIGIT, and wherein optionally the first extracellular antigen binding domain comprises the amino acid sequence of SEQ ID NO: 145 or an amino acid sequence having at least 75%, 80%, 85%, 90%, 91%, 92%, 93%, 94% 95% 96%, 97% 98%, or 99% identity to SEQ ID NO: 145; or
(iv) wherein the first extracelluar antigen domain is derived from SIRP-α or a variant thereof, wherein optionally the first extracelluar antigen domain is derived from the ECD of SIRP-α, and wherein optionally the first extracellular antigen binding domain comprises the amino acid sequence of SEQ ID NO: 147 or an amino acid sequence having at least 75%, 80%, 85%, 90%, 91%, 92%, 93%, 94%, 95%, 96%, 97%, 98%, or 99% identity to SEQ ID NO: 147.

4. The immune effector cell of any one of claims 1 to 3, wherein the first transmembrane domain comprises a Janus Kinase (JAK)-binding domain.

5. The immune effector cell of claim 4, wherein the JAK-binding domain is derived from a group consisting of EPOR, GHR, TPOR, or a variant thereof.

6. The immune effector cell of claim 5, wherein the JAK-binding domain is derived from TPOR and comprises an amino acid sequence of SEQ ID NO: 7 or an amino acid sequence having at least 75%, 80%, 85%, 90%, 91%, 92%, 93%, 94%, 95%, 96%, 97%, 98%, or 99% identity to SEQ ID NO: 7.

7. The immune effector cell of any one of claims 1 to 6, wherein the cytokine receptor intracellular domain is derived from one or more cytokine receptors selected from a group consisting of IL2Rα, IL7Rα, IL9R-1, IL9R-2, IL9R-3, IL12Rβ1, IL12Rβ2, IL15Rα, IL15Rβ-1, IL15Rβ-2, IL15Rβ-3, IL18Rα, IL18Rβ, IL21R-1, IL21R-2, IL21R-3, IL10R2, IL22R1, IL23R-1, IL23R-2, IL23R-3, IL27Rα, gp130, IL31RA, OSMRβ, IL36R, IL1RAcP, GM-CSFRα, GM-CSFRβ-1, GM-CSFRβ-2, or a variant thereof, and combinations thereof.

8. The immune effector cell of claim 7, wherein the cytokine receptor intracellular domain is selected from IL-7Rα, IL12Rβ1, IL12Rβ2, IL15Rα, IL15Rβ-1, IL15Rβ-2, IL15Rβ-3, IL-18Rα, IL18Rβ, IL21R-1, IL21R-2, IL21R-3, IL23R-1, IL23R-2, IL23R-3, GM-CSFRα, GM-CSFRβ-1, GM-CSFRβ-2, IL9R-1, TL9R-2, TL9R-3, IL-7Rα-IL12Rβ1, IL-7Rα-IL15Rα, IL-7Rα-IL15Rβ-1, IL-7Rα-IL15Rβ-2, IL-7Rα-IL21R-1, IL-7Rα-IL21R-2, IL-7Rα-IL21R-3, IL-7Rα-IL23R-2, IL-7Rα-GMCSFRα, IL-7Rα-GM-CSFRβ-1, IL-7Rα-GM-CSFRβ-2, IL12Rβ1-IL15Rα, IL12Rβ1-IL15Rβ-1, IL12Rβ1-IL15Rβ-2, IL12Rβ1-IL-21R-1, IL12Rβ1-IL-21R-2, IL12Rβ1-IL-21R-3, IL12Rβ1-IL-23R-2, IL12Rβ1-GM-CSFRα, IL12Rβ1-GM-CSFRβ-1, IL12Rβ1-GM-CSFRβ-2, IL12Rβ2-IL15Rα, IL12Rβ2-IL15Rβ-1, IL12Rβ2-IL15Rβ-2, IL12Rβ2-IL-21R-1, IL12Rβ2-IL-21R-2, IL12Rβ2-IL-21R-3, IL12Rβ2-IL-23R-2, IL12Rβ2-GM-CSFRα, IL12Rβ2-GM-CSFRβ-1, IL12Rβ2-GM-CSFRβ-2, IL15Rα-IL-21R-1, IL15Rα-IL-21R-2, IL15Rα-IL-21R-3, IL15Rα-IL-23R-2, IL15Rα-GM-CSFRα, IL15Rα-GM-CSFRβ-1, IL15Rα-GM-CSFRβ-2, IL15Rβ-1-IL-21R-1, L15Rβ-1-IL-21R-2, IL15Rβ-1-IL-21R-3, IL15Rβ-1-IL-23R-2, IL15Rβ-1-GM-CSFRα, IL15Rβ-1-GM-CSFRβ-1, IL15Rβ-1-GM-CSFRβ-2, IL15Rβ-2-IL-21R-1, IL15Rβ-2-IL-21R-2, IL15Rβ-2-IL-21R-3, L15Rβ-2-IL-23R-2, IL15Rβ-2-GM-CSFRα, IL15Rβ-2-GM-CSFRβ-1, IL15Rβ-2-GM-CSFRβ-2, IL-21R-1-IL-23R-2, IL-21R-1-GM-CSFRα, IL-21R-1-GM-CSFRβ-1, IL-21R-1-GM-CSFRβ-2, IL-21R-2-IL-23R-2, IL-21R-2-GM-CSFRα, IL-21R-2-GM-CSFRβ-1, IL-21R-2-GM-CSFRβ-2, IL-21R-3-IL-23R-2, IL-21R-3-GM-CSFRα, IL-21R-3-GM-CSFRβ-1, IL-21R-3-GM-CSFRβ-2, IL-23R-2-GM-CSFRα, IL-23R-2-GM-CSFRβ-1, IL-23R-2-GM-CSFRβ-2, IL-7Rα-IL-9R-2, IL12Rβ1-IL-9R-2, IL12Rβ2-IL-9R-2, IL15Rα-IL-9R-2, IL15Rβ-1-IL-9R-2, IL15Rβ-2-IL-9R-2, IL-21R-1-IL-9R-2, IL-21R-2-IL-9R-2, IL-21R-3-IL-9R-2, IL-23R-2-IL-9R-2, GM-CSFRα-IL-9R-2, GM-CSFRβ-1-IL-9R-2, GM-CSFRβ-2-IL-9R-2, IL-7Rα-IL-12Rβ2, or a variant thereof.

9. The immune effector of claim 7, wherein the cytokine receptor intracellular domain comprises an amino acid sequence selected from SEQ ID NOs: 8-28, or an amino acid sequence having at least 75%, 80%, 90%, 91%, 92%, 93%, 94%, 95%, 96%, 97%, 98%, or 99% identity to an amino acid sequence selected from SEQ ID NOs: 8-28.

10. The immune effector of claim 9, wherein the cytokine receptor intracellular domain comprises one or more the amino acid sequences of SEQ ID NOs: 8, 10, 14-17 or 20-28.

11. The immune effector cell of any one of claims 1 to 10, wherein the functional exogenous receptor is a T cell receptor (TCR), a chimeric antigen receptor (CAR), a chimeric TCR (cTCR), or a T cell antigen coupler (TAC)-like chimeric receptor.

12. The immune effector cell of claim 11, wherein the functional exogenous receptor is a CAR, wherein optionally the CAR is a single CAR, dual CAR, tandem CAR or split CAR.

13. The immune effector cell of claim 12, wherein the CAR binds to a tumor-associated antigen, wherein optionally the tumor-associated antigen is selected from the group consisting of GPC3, AFP, Claudin 18.2, CD19, CD20, CD22, BCMA, GD2, DLL3, MSLN, CD30, CLL1 and CD33.

14. The immune effector cell of claim 11, wherein the functional exogenous receptor is a TCR.

15. The immune effector cell of claim 14, wherein the TCR binds to tumor-associated antigen, wherein optionally the tumor-associated antigen is selected from the group consisting of GPC3, AFP, Claudin 18.2, CD19, CD20, CD22, BCMA, GD2, DLL3, MSLN, CD30, CLL1 or CD33.

16. The immune effector cell of any one of claims 1 to 15, wherein the second transmembrane domain is derived from a molecule selected from the group consisting of CD8, CD4, CD28, CD137, CD80, CD86, CD152 and PD1.

17. The immune effector cell of claim 16, wherein the second transmembrane domain is from CD8α or CD28.

18. The immune effector cell of any one of claims 1 to 17, wherein the intracellular signaling domain comprises a primary intracellular signaling domain of an immune effector cell.

19. The immune effector cell of claim 18, wherein the primary intracellular signaling domain is from CD3ζ.

20. The immune effector cell of any one of claims 1 to 19, wherein the intracellular signaling domain comprises a co-stimulatory signaling domain.

21. The immune effector cell of claim 20, wherein the co-stimulatory signaling domain is derived from a co-stimulatory molecule selected from the group consisting of CD27, CD28, CD137, OX40, CD30, CD40, CD3, LFA-1, ICOS, CD2, CD7, LIGHT, NKG2C, B7-H3, ligands of CD83 and combinations thereof.

22. The immune effector cell of claim 21, wherein the co-stimulatory signaling domain comprises a cytoplasmic domain of CD28 and/or a cytoplasmic domain of CD137.

23. The immune effector cell of any one of claims 1 to 22, wherein the functional exogenous receptor further comprises a hinge domain located between the C-terminus of the extracellular antigen binding domain and the N-terminus of the transmembrane domain.

24. The immune effector cell of claim 23, wherein the hinge domain is from CD8α.

25. The immune effector cell of any one of claims 1 to 24, wherein the chimeric cytokine receptor and/or the functional exogenous receptor further comprises a signal peptide.

26. The immune effector cell of claim 25, wherein the signal peptide is from CD8α.

27. The immune effector cell of any one of claims 12, 13 and 16 to 26, wherein the CAR comprises the amino acid sequence of SEQ ID NOs: 29, 135, 141, 143 or 149, or an amino acid sequence having at least 75%, 80%, 85%, 90%, 91%, 92%, 93%, 94%, 95%, 96%, 97%, 98%, or 99% identity to SEQ ID NOs: 29, 135, 141,143 or 149.

28. The immune effector cell of any one of claims 1 to 27, wherein the immune effector cell comprises the amino acid sequence of SEQ ID NOs: 30-134, 136-140, 142, 144, 146 or 148, or an amino acid sequence having at least 75%, 80%, 85%, 90%, 91%, 92%, 93%, 94%, 95%, 96%, 97%, 98%, or 99% identity to SEQ ID NOs: 30-134, 136-140, 142, 144, 146 or 148.

29. The immune effector cell of any one of claims 1 to 28, wherein the chimeric cytokine receptor further comprises a tag and/or the functional exogenous receptor further comprises a tag.

30. The immune effector cell of claim 29, where the tag linking to the chimeric cytokine receptor is different form the tag linking to the functional exogenous receptor.

31. The immune effector cell of claim 29 or 30, wherein the tag comprises an amino acid sequence SEQ ID NOs: 4, 5 or 158-160, or an amino acid sequence having at least 75%, 80%, 90%, 91%, 92%, 93%, 94%, 95%, 96%, 97%, 98%, or 99% identity to an amino acid sequence selected from SEQ ID NOs: 4, 5 or 158-160.

32. The immune effector cell of any one of claims 1 to 31, wherein the immune effector cell is a T cell, a natural killer (NK) cell, a NK T cell, a macrophage, a peripheral blood mononuclear cell (PBMC), a monocyte, a neutrophil, or an eosinophil.

33. The immune effector cell of claim 32, wherein the T cell is a cytotoxic T cell, a helper T cell, a natural killer T cell, a αβ T cell, or a γδT cell.

34. A polypeptide comprising:
(i) a chimeric cytokine receptor comprising:
(a) a first extracellular antigen binding domain, wherein the first extracellular antigen binding domain is derived from NKG2D, truncated NKG2D, antibody or antigen binding fragment thereof targeting NKG2D ligands, TIGIT or SIRP-α, or a variant thereof,
(b) a first transmembrane domain, and
(c) a cytokine receptor intracellular domain; and
(ii) optionally a functional exogenous receptor comprising:
(a) a second extracellular antigen binding domain,
(b) a second transmembrane domain, and
(c) an intracellular signaling domain.

35. The polypeptide of claim 34, wherein the first extracellular antigen binding domain binds to an antigen expressed on the surface of a tumor cell.

36. The polypeptide of claim 34 or claim 35,
(i) wherein the first extracellular antigen binding domain is derived from NKG2D, or truncated NKG2D, or a variant thereof, wherein optionally the first extracellular antigen binding domain is derived from the ECD of NKG2D or truncated NKG2D, and wherein optionally the first extracellular antigen binding domain comprises the amino acid sequence of SEQ ID NOs: 6, 156 or 157, or an amino acid sequence having at least 75%, 80%, 85%, 90%, 91%, 92%, 93%, 94%, 95%, 96%, 97%, 98%, or 99% identity to SEQ ID NOs: 6, 156 or 157;
(ii) wherein the first extracelluar antigen domain comprises an antibody or antigen binding fragment thereof that binds to an NKG2D ligand or a variant thereof, wherein optionally the NKG2D ligand is selected from a group consisting of MICA/B, ULBP-1, ULBP-2,5,6 and ULBP-3, and wherein optionally the antibody or antigen binding fragment thereof comprises one or more scFv(s) or one or more sdAb(s) that bind to the NKG2D ligand;
(iii) wherein the first extracelluar antigen domain is derived from TIGIT or a variant thereof, wherein optionally the first extracelluar antigen domain is derived from the ECD of TIGIT, and wherein optionally the first extracellular antigen binding domain comprises the amino acid sequence of SEQ ID NO: 145; or
(iv) wherein the first extracelluar antigen domain is derived from SIRP-α or a variant thereof, wherein optionally the first extracelluar antigen domain is derived from the ECD of SIRP-α, and wherein optionally the first extracellular antigen binding domain comprises the amino acid sequence of SEQ ID NO: 147.

37. The polypeptide of any one of claims 34 to 36, wherein the first transmembrane domain comprises a Janus Kinase (JAK)-binding domain.

38. The polypeptide of claim 37, wherein the JAK-binding domain is derived from a group consisting of EPOR, GHR, TPOR, or a variant thereof.

39. The polypeptide of claim 38, wherein the JAK-binding domain is derived from TPOR and comprises an amino acid sequence of SEQ ID NO: 7 or an amino acid sequence having at least 75%, 80%, 85%, 90%, 91%, 92%, 93%, 94%, 95%, 96%, 97%, 98%, or 99% identity to SEQ ID NO: 7.

40. The polypeptide of any one of claims 34 to 39, wherein the cytokine receptor intracellular domain is derived from one or more cytokine receptors selected from a group consisting of IL2Rα, IL7Rα, IL9R-1, TL9R-2, IL9R-3, IL12Rβ1, IL12Rβ2, IL15Rα, IL15Rβ-1, IL15Rβ-2, IL15Rβ-3, IL18Rα, IL18Rβ, IL21R-1, IL21R-2, IL21R-3, IL10R2, IL22R1, IL23R-1, IL23R-2, IL23R-3, IL27Rα, gp130, IL31RA, OSMRβ, TL36R, IL1RAcP, GM-CSFRα, GM-CSFRβ-1, GM-CSFRβ-2, or a variant thereof, and combinations thereof.

41. The polypeptide of claim 40, wherein the cytokine receptor intracellular domain is selected from IL-7Rα, IL12Rβ1, IL12Rβ2, IL15Rα, IL15Rβ-1, IL15Rβ-2, IL15Rβ-3, IL-18Rα, IL18Rβ, IL21R-1, IL21R-2, IL21R-3, IL23R-1, IL23R-2, IL23R-3, GM-CSFRα, GM-CSFRβ-1, GM-CSFRβ-2, IL9R-1, IL9R-2, IL9R-3, IL-7Rα-IL12Rβ1, IL-7Rα-IL15Rα, IL-7Rα-IL15Rβ-1, IL-7Rα-IL15Rβ-2, IL-7Rα-IL21R-1, IL-7Rα-IL21R-2, IL-7Rα-IL21R-3, IL-7Rα-IL23R-2, IL-7Rα-GMCSFRα, IL-7Rα-GM-CSFRβ-1, IL-7Rα-GM-CSFRβ-2, IL12Rβ1-IL15Rα, IL12Rβ1-IL15Rβ-1, IL12Rβ1-IL15Rβ-2, IL12Rβ1-IL-21R-1, IL12Rβ1-IL-21R-2, IL12Rβ1-IL-21R-3, IL12Rβ1-IL-23R-2, IL12Rβ1-GM-CSFRα, IL12Rβ1-GM-CSFRβ-1, IL12Rβ1-GM-CSFRβ-2, IL12Rβ2-IL15Rα, IL12Rβ2-IL15Rβ-1, IL12Rβ2-IL15Rβ-2, IL12Rβ2-IL-21R-1, IL12Rβ2-IL-21R-2, IL12Rβ2-IL-21R-3, IL12Rβ2-IL-23R-2, IL12Rβ2-GM-CSFRα, IL12Rβ2-GM-CSFRβ-1, IL12Rβ2-GM-CSFRβ-2, IL15Rα-IL-21R-1, IL15Rα-IL-21R-2, IL15Rα-IL-21R-3, IL15Rα-IL-23R-2, IL15Rα-GM-CSFRα, IL15Rα-GM-CSFRβ-1, IL15Rα-GM-CSFRβ-2, IL15Rβ-1-IL-21R-1, L15Rβ-1-IL-21R-2, IL15Rβ-1-IL-21R-3, IL15Rβ-1-IL-23R-2, IL15Rβ-1-GM-CSFRα, IL15Rβ-1-GM-CSFRβ-1, IL15Rβ-1-GM-CSFRβ-2, IL15Rβ-2-IL-21R-1, IL15Rβ-2-IL-21R-2, IL15Rβ-2-IL-21R-3, L15Rβ-2-IL-23R-2, IL15Rβ-2-GM-CSFRα, IL15Rβ-2-GM-CSFRβ-1, IL15Rβ-2-GM-CSFRβ-2, IL-21R-1-IL-23R-2, IL-21R-1-GM-CSFRα, IL-21R-1-GM-CSFRβ-1, IL-21R-1-GM-CSFRβ-2, IL-21R-2-IL-23R-2, IL-21R-2-GM-CSFRα, IL-21R-2-GM-CSFRβ-1, IL-21R-2-GM-CSFRβ-2, IL-21R-3-IL-23R-2, IL-21R-3-GM-CSFRα, IL-21R-3-GM-CSFRβ-1, IL-21R-3-GM-CSFRβ-2, IL-23R-2-GM-CSFRα, IL-23R-2-GM-CSFRβ-1, IL-23R-2-GM-CSFRβ-2, IL-7Rα-IL-9R-2, IL12Rβ1-IL-9R-2, IL12Rβ2-IL-9R-2, IL15Rα-IL-9R-2, IL15Rβ-1-IL-9R-2, IL15Rβ-2-IL-9R-2, IL-21R-1-IL-9R-2, IL-21R-2-IL-9R-2, IL-21R-3-IL-9R-2, IL-23R-2-IL-9R-2, GM-CSFRα-IL-9R-2, GM-CSFRβ-1-IL-9R-2, GM-CSFRβ-2-IL-9R-2, IL-7Rα-IL-12Rβ2, or a variant thereof.

42. The polypeptide of claim 41, wherein the cytokine receptor intracellular domain comprises an amino acid sequence selected from SEQ ID NOs: 8-28, or an amino acid sequence having at least 75%, 80%, 90%, 91%, 92%, 93%, 94%, 95%, 96%, 97%, 98%, or 99% identity to an amino acid sequence selected from SEQ ID NOs: 8-28.

43. The polypeptide of claim 42, wherein the cytokine receptor intracellular domain comprises one or more the amino acid sequences of SEQ ID NOs: 8, 10, 14-17 or 20-28.

44. The polypeptide of any one of claims 34 to 43, wherein the functional exogenous receptor is a T cell receptor (TCR), a chimeric antigen receptor (CAR), a chimeric TCR (cTCR), or a T cell antigen coupler (TAC)-like chimeric receptor.

45. The polypeptide of claim 44, wherein the functional exogenous receptor is a CAR, wherein optionally the CAR is a single CAR, dual CAR, tandem CAR or split CAR.

46. The polypeptide of claim 45, wherein the CAR binds to a tumor-associated antigen, wherein optionally the tumor-associated antigen is selected from the group consisting of GPC3, AFP, Claudin 18.2, CD19, CD20, CD22, BCMA, GD2, DLL3, MSLN, CD30, CLL1 and CD33.

47. The polypeptide of claim 44, wherein the functional exogenous receptor is a TCR.

48. The polypeptide of claim 47, wherein the TCR binds to tumor-associated antigen, wherein preferably the tumor-associated antigen is selected from the group consisting of GPC3, AFP, Claudin 18.2, CD19, CD20, CD22, BCMA, GD2, DLL3, MSLN, CD30, CLL1 and CD33.

49. The polypeptide of any one of claims 34 to 48, wherein the second transmembrane domain is derived from a molecule selected from the group consisting of CD8, CD4, CD28, CD137, CD80, CD86, CD152 and PD1.

50. The polypeptide of claim 49, wherein the second transmembrane domain is from CD8α or CD28.

51. The polypeptide of any one of claims 34 to 50, wherein the intracellular signaling domain comprises a primary intracellular signaling domain of an immune effector cell.

52. The polypeptide of claim 51, wherein the primary intracellular signaling domain is from CD3ζ.

53. The polypeptide of any one of claims 34 to 52, wherein the intracellular signaling domain comprises a co-stimulatory signaling domain.

54. The polypeptide of claim 53, wherein the co-stimulatory signaling domain is derived from a co-stimulatory molecule selected from the group consisting of CD27, CD28, CD137, OX40, CD30, CD40, CD3, LFA-1, ICOS, CD2, CD7, LIGHT, NKG2C, B7-H3, ligands of CD83 and combinations thereof.

55. The polypeptide of claim 54, wherein the co-stimulatory signaling domain comprises a cytoplasmic domain of CD28 and/or a cytoplasmic domain of CD137.

56. The polypeptide of any one of claims 34 to 55, wherein the functional exogenous receptor further comprises a hinge domain located between the C-terminus of the extracellular antigen binding domain and the N-terminus of the transmembrane domain.

57. The polypeptide of claim 56, wherein the hinge domain is from CD8α.

58. The polypeptide of any one of claims 34 to 57, wherein the chimeric cytokine receptor and/or the functional exogenous receptor further comprises a signal peptide.

59. The polypeptide of claim 58, wherein the signal peptide is from CD8α.

60. The polypeptide of any one of claims 34 to 59, wherein the chimeric cytokine receptor and the functional exogenous receptor are linked to each other via a peptide linker.

61. The polypeptide of claim 60, wherein the peptide linker is a self-cleaving peptide linker.

62. The polypeptide of claim 61, wherein the self-cleaving peptide linker is a 2A self-cleaving peptide.

63. The polypeptide of claim 62, wherein the 2A self-cleaving peptide is selected from a group consisting of F2A, E2A, P2A, T2A, and variants thereof.

64. The polypeptide of any one of claims 45, 46 and 49 to 63, wherein the CAR comprises the amino acid sequence of SEQ ID NOs: 29, 135, 141, 143 or 149, or an amino acid sequence having at least 75%, 80%, 85%, 90%, 91%, 92%, 93%, 94%, 95%, 96%, 97%, 98%, or 99% identity to SEQ ID NOs: 29, 135, 141, 143 or 149.

65. The polypeptide of any one of claims 34 to 64, wherein the immune effector cell comprises the amino acid sequence of SEQ ID NOs: 30-134, 136-140, 142, 144, 146 or 148, or an amino acid sequence having at least 75%, 80%, 85%, 90%, 91%, 92%, 93%, 94%, 95%, 96%, 97%, 98%, or 99% identity to SEQ ID NOs: 30-134, 136-140, 142, 144, 146 or 148.

66. The polypeptide of any one of claims 34 to 65, wherein the chimeric cytokine receptor further comprises a tag and/or the functional exogenous receptor further comprises a tag.

67. The polypeptide of claim 66, where the tag linking to the chimeric cytokine receptor is different form the tag linking to the functional exogenous receptor.

68. The polypeptide of claim 66, wherein the tag comprises an amino acid sequence SEQ ID NOs: 4, 5 or 158-160, or an amino acid sequence having at least 75%, 80%, 90%, 91%, 92%, 93%, 94%, 95%, 96%, 97%, 98%, or 99% identity to an amino acid sequence selected from SEQ ID NOs: 4, 5 or 158-160.

69. An isolated nucleic acid comprising a nucleic acid sequence encoding the polypeptide of any one of claims 34 to 68.

70. An isolated nucleic acid comprising:
(i) a first region encoding a chimeric cytokine receptor comprising:
(a) a first extracellular antigen binding domain, wherein the first extracellular antigen binding domain is derived from NKG2D, truncated NKG2D, antibody or antigen binding fragment thereof targeting NKG2D ligands, TIGIT, or SIRP-α, or a variant thereof,
(b) a first transmembrane domain, and
(c) a cytokine receptor intracellular domain; and
(ii) optionally a second region encoding a functional exogenous receptor comprising:
(a) a second extracellular antigen binding domain,
(b) a second transmembrane domain, and
(c) an intracellular signaling domain.

71. A vector comprising the nucleic acid of claim 69 or claim 70.

72. A method of making an immune effector cell comprising introducing into an immune cell:
(i) the nucleic acid of claim 69 or claim 70 or the vector of claim 71; or
(ii) a composition comprising a first nucleic acid encoding a chimeric cytokine receptor comprising (a) a first extracellular antigen binding domain, (b) a first transmembrane domain, and (c) a cytokine receptor intracellular domain; and a second nucleic acid encoding a functional exogenous receptor comprising (a) a second extracellular antigen binding domain, (b) a second transmembrane domain, and (c) an intracellular signaling domain.

73. An immune effector cell produced according the method of claim 72.

74. A pharmaceutical composition, comprising the immune effector cell of any one of claims 1 to 33 and 73, the polypeptide of any one of claims 34 to 68, the nucleic acid of claim 69 or claim 70, or the vector of claim 71, and a pharmaceutically acceptable carrier.

75. A method of treating a disease or disorder in a subject, comprising administering to the subject an effective amount of the pharmaceutical composition of claim 74.

76. The method of claim 75, wherein the disease or disorder is a cancer, an inflammatory or autoimmune disease.

77. The method of claim 76, wherein the cancer is solid cancer or hematologic cancer.

78. The method of claim 77, wherein the cancer is liver cancer, lymphoma, acute myeloid leukemia (AML) or chronic myelogenous leukemia (CML).
